United States Patent Application Publication US 2026/0137732 A1 - sequence listing, part 3

SEQ ID NO: 2 - DNA, 3200297 bp, Akkermansia muciniphila (residues 1,600,150-3,200,297 of 3,200,297)
  source 1..3200297: mol_type = genomic DNA
gtccagttgccttcctgcgggatgggggccggaccatggttgcagcctttcttgacgcaacacatttgttcgatttcgtgtgtaaactgcatggtattaggatgttaatatgaagatgggcctgcagtcatcggacagccccaccttgagcgggacggatcataccagcaaaatcccgattggcaaacacgaatgattgaaaaccgggcgaaatgcttcatcatcagtccggagcccgccccgcatgaagtcacgcccgcgtcatccccttctcaacaaacttgcaatcatctctgtctcaatactgatgatcggcttttccttattcatgtgggcgtggcaggtggaacccaggcgcgtggaaaccgtcacgaccgcgctggaagtgccgcagtggaaggaaaaaggcggctccccgctccggatcgtgatcgccggagacttccacctgcgcccgaacggcggcgaccaggcgcgccggtacatggaaaaaatcatggaggcccagccggacatgatcttcctgctgggggactacgccaacggccacacccgggagagcagcatgagtccggaaacagccagggaatacttcaagatgctgaaggcccccctgggcatcttcgccgtacagggcaaccatgaccagtactacggctgggacctgtggcggaacatgttttccgagctgggcatcctgcccatgtggaacgattccctgctgctgcacctccccggaggcagagatttgcagctttcctccgttcgggacgactaccacctgagaatcaggccggaggaactgccgctgcgtttttccccggacattccccacatcctgctctcccacgtgccggacatctttcccctgctggctcccggcacggcggacgccgtcatcagcgcccatacccacggcgggcagatctgcctgcccggcggcaagcccctggcgaacatctcccgggagaaggccaaattctcctatccctggtcccagctgaacggaacccccttcctcatcacccgcgggctgggatgcagcgttcttcccctgcgcttctgctgccctccggaaatcatcgtgctggaaatccaataaaaacaatcgttcggaacactccctgccctcctatgccctctcctttttattcacatgatatttacctgttattaacagtgacgtgcatggccgtggcgctggaatcgtgctccgtccccgtcaaggctccggaagccgtggccggatggtatgaaggaaccctctacgaagacaaacccttctacatcactaaaaacgccatcagctggaccagcggtaggaaaaaggcggacttcggccactggaccgccgtcagcgtgtatgaccccaccatccgcctgaaagcggagggcggtacattcaccatctcacccggctacggctgggacggcgtcacctggggaaccaccccgccggacatgctgttcccttccctgtttcacgacgccatgctgcacgctaaaatgaatggcgcgcccatcgccagaaaccagattgacctggccttctacgacctcatgaccagccagcacgccagccgcaaggggctttactaccgctttgtgcgcctcttcggctggtgctttacccttccccagcacccgcacacattgacgatccgccgggaggaatccggggtagaataatttccctgcacacatgccgctccgtttgctgccctgcggcttgctcgtctccggcttcagatcttttctcatgattactctcctttctctggaaggatttaagccatggaacatgaacggactgaaaaaactgacgcccggaaagcccgcagaaggagggaaaatttgaccagacgcatcctgttttgccttgcctgattagttagtttaatctaacttctggcgtcgtaacaacaaccagcacacatggaaatcaccattatctacggaacggaaacaggaaattcggaaagcctggcccgggaggcccgggaaaaactgacaaagctcggccatcaggcaacagtggttgatatggaggatatgacggtggaacagttgaaaaatgcgggaacgctgctggtcgtcaccagcacgtggggagacggcgaacctccctccaatgcagaggcgctgtaccaggcattgaaggactcctcggaagacctttctacagtcaattatgccgtcttcgcccttggggatgaattttatgaaaacttctgccaggcaggcaaggacttcgatgccttcctggaacgtttgaaggcgcaaaggctgctgccggtagccctgtccgatggggattatgacgccaccttcccggaatgggtagatgccctcgcggaaaaactttcctgacgtttcttccttttttatttttaaggtgtgtaaaacgcctcatcttcaaatcggacactcctttaaaaaaacgcttcttccggcatcagggctgggagaggcgctcttttttcctgaaaaacaggtccccagtaaaaccatttgccgctcctgggaataagggactccggcccccttatcaacttgctccctccgaagcaaggcgaaggctttcaaaattaaaataccctcctttcctcattatcttgccgcctcagataaaaagttacaaattcctatccctccccttccgaattcccgtcaagttcaactcaaaggcgcccgcgactggcaaaactccactttcttctttccgcccaaccgatgaagcctgaatttggccacatccaccaagttggcaaaatctctcaatttgggcccggcaatcaccttctccagatattcctccccctcatgaataaccggcaaatagccgaccgacaggcagttttttccctccagtaccttgagaggggaactctggtcattataaggatgcaaagaaagaatcctcaattccttttcatccttgaaggcggcatccttcaccagatgcctcaggtaaatgagcatctccagggcagctttttgagccttttcgctgatacactcaaaaagcatccgaatattcttcaatgatttgcctatctcctgcaatttctttctttcagactctttcaatgcgtcttcgcaaacattaaaatccctgtttaacgagtattcagaacatgcaggggtataatgcacccgaccggaagagcaatcataatacaatacccagtaaagagggagcttgcggcgcatgtcagtctcttttccggaggaggagtcgtcctctttctggacggcaatcatggacgtttctcccggtttggcaaaaaaggatcggttaaataccaggcacagcccggttccttcctctcccttgttttttccgtaaaggcggaactggttcaaggaatcaatggcagaagaaaaggaagcctgcaatacggcaagatggctctgaattctctgggaaggcagacaatcctgttttagaaatgcctgaaaaacggtgccttccgtaggatcattagccgcagccaggctacataacgacaggggatttgcgtgaccgtccgtttccgtctgcttttggagcaaggtttcaaaaaccatagaggaagtgtaatgccctacctgctcaaggtcagcgctaagcaaataaagaagcctatattgttccacccacagacggtgaatacaggataaatctttgccggagcatccacccagtttttccctgcttgccaggacattgaaatcttcgtctccactccataaatccacctgactattttctgacaggccatcccagaattccttgcttcccactaacgacctccggtttcgtttggctatttcattaccggcattgatttgaatggcttgaatataacaagccaatgcctcttcctttttgccgagattggataataaaagccctttattgttcagggctgcatcatgatgagggttgatttccagcgccttgttataacaggccagagcttcctccttccgtcccaggtcatccatgacatttcccatgttgtaacaggccgccccataaccaggattgatttccaatgccttactatagctggccagagcttcctcctttcttcccaggtcatccaggacatttcccttgttataatgggccgcatcgtaaccgggattgatctccagcgccttgttgtagctggcaagggcctcttccttttgtcctaaacttttcaggataatgcccctgttgcaataagccttatcataatcaggtctgatttccagagccttgttatagctgtccaacgcttccttcttccggccgagatcgttcaggatatttcctttattgtagtaggccgcatggtccccaggattaatttccagcgctttgtcatagctctgcaacgcctcctccttcctcccgagatcgtccagaatatgtcctctgttgtaatgggttgcatcatttcctgggttgatttccaacgctttatcgtaactggataaagcttcctccttcctttctaattttttcaatacaatgcccctgttgcaataggctttatcgtaagcagggttgatttccagagccctgttatagctgtccagcgcttcctcgctgcgtcccaggtcatccaggacattccctttcttcacataagccgtgaaattttcaggatcaagagcgatctctcgttcccatttttccaattcccccttcaatttttctttgtccatgccaaatcaatcttgaatatatccaatactacccagcgggaaaacctttggaaagaggataataggaatgaaaacaattcagggaagaaaagaatccccgctttattcctcaatcggcgtggcttcgggaatgtattcattcccggcgggggccgtctggcgggtttccgtgacgaagccaaggacgcggtccacatccagctgggacagcacggtgcgcacgtcctggtcttccaggaagcgggtgagcttgacgtcgttgtaaaggccctgcatgtcccccttctctaccagcaggcggatggcggggtcttcgctcaggcttttcaggctcagcacgcggctggtgatgcgggagcggggcatgtagcaatccagctgggtgcggcgctggtcggagagttccgggctgagcgtcaccaggtaggcaatcatttttgccagggagaggcgttccgggtcgtgttccggggagatggccaccagccagttcaggtggggattgtccgtgatggacttcttgacggagtaaatggcgggcagggaaatggtgcggctgggatccatgtggtacagcgccagttcgcgggcgcgggtcatttccgccatggagccgtagtagaagatgcacatgacgcccacccagcagacaaccaccgccatcaggatggtggtgacgatgcccttggccccgccgaagcccatgcgccccccccaggagaagacgtcactgaaccagaacaggccgtgcatgaagatgaagaagactgccgcagcccccccgacggacagcacggtgaccatccattcccgcgggtcgctggtgatgaaggagagataggtaaagccgtatttggacagccagaagtacgctgccacggcggagagcaccgccgcgccgaacaggagcatcttgatcatccccttcagcatgccgagcacgatgaagccgaccagcagcgcgcccagaaccaggtagaatgtgagggaggagtccatgaatgacgggaaagaagccgcgttacaatgcccgctggcagcgctggcgcagatagtggtcgcacaggcagagccaggccatggcttccacaatgggcacggcgcgcggcagcacgcaggcgtcatgccgtcccctgcccttgagccgggcgtcctcccctgcctggttgaccgtctgctggtcaaccatcaaggtggcggtgggcttgaagccgatgcgcatcaggatgtcttctccgttggagatgccgccctggatgccgccggagtggttggtgacggtatgcacatggccgtcccgcatgtaaaaagggtcgttgtgttccagtccggtcatgtccgccgcttcaaagccggagcccacggcaaaggccttggtggcgggaatgctcatcatggcgtgggccagcgtggcgtccagcttgtcaaagacggggtcccccagtccgggagggcagccgcgcaccacgcatttgaccacgccgcccagggagttgccggcgtcccgcgcctccttgatggcggcaatcatggcctccaccacggaggggtccgccgtgcggacgatgttgctttcaatgacggaggccgtgacggcctcccagtccacggaggctttcacatgatgcacctggtccacccaggctatgatctccatgccgggaaaggcctgcttgagcacggccctggccacggccccggcggcgacgcgcccgatggtttcccgtgcggaggccctgccgccgcccgcccaggcgcggatgccgtatttggcgtcgtacgtgtagtccgcatgggaggggcggtacgtgtgggccatttcatcataggcggaggaacggtggtccttgttccgcacgctgacggcgatgggcgttcccagggttttgccgtccagcacgccggagagtatttccgcgcggtcttcctccttgcggggcgtcacgatgtcgctctgccccggcctgcgccggtccagctcccgctgaatggcttcttccgtcaccgggacgagggacggacagccgtcaatcaccacgcctaccccggctccatgggattcaccccaggtggagattctgaacacctgaccaaaactgctggacatggcggcattctagacggcggcgtccatccggtcaagccgtggacttccgcagcgggacataaaaaaacaccccggtccgcagaggacggggtgctgaaagaaaagtgctcttttgggaagcagctgccgtcttagtccttcagggcggaagaggccttgaaagcaaccgtcttggaggcgggaatgttgatcgccttgccggtcttcgggttgcggccggtacgggcttcacgggtcttggtagcaaacgtaccaaagccgatgatctgcaccttgccggattcctgcacgccttccttgatggattccagcacagcggccagagcttcttcagcgtgcttcttggtcgtatcggcacccagcttgttttgaatcaattcgatcagttgagccttgttcataggacttcggtgaatagcatatggagccctgacagtaaagaaaaaatgcggtacaccggcaaatcaggacccaaaaacggcgttaattgtcgtcatccggctgtctttccaccgcggctccgatcgccaggagcttttcgtcaatcatttcatagccccggtcaatgtggtacaggcggtggatttccgtggtgccttccgccttcagggcggccagcaccagcgcggcggatgcgcgcagatcggacgccatgacgggcgcgccgctcaggctttccacgccggagatgacggcggtgccgttgtccaccttgatatccgcgcccatgcgcttgagctcggagcagtgcatgaagcgctgcggaaaaatggtatccttcaccacggagatgcccggcgtggtggcaaagagggccgtcatctgggcctgcatgtccgtgggatagccgggatagggggccgtcttgatttccccgcatttgggcgtattcccggcaatgatggtgaccgtgtccccccgttcgttgaattccacgtggtggccgcatttccggagcaggtccgtcaccacggtcatgtgctcctcacagacgcgccgcagggttacgccgtcccccatcatggccgcggccaccatgaaggtgccggcctcaatgcggtccggaatgacggtatggttgcagccgcggagtttttcaaccccttcaatgacgatccggcgcgttccggcgccctggatatgggcgcccatcttgatcaggaagttcgccaagtccaccacttccggctcggatgcggcggattcaatgacggtggttccttccgccagcacggcggccatcatcaggttgtccgttcccagaacggtggggccgtgatcgcccctcaaatctatggtggctcccttcaacccccggggcgcttcgataaccaggttgccgcgttcaatctgcacctgggcgcccagagcctgaatggcccggatgtgcaggtccacgggacggtcgccgatcacgcagccgcccggcagcggaatcacgcaccgctgcatgcgggccatcagggggcccatcaggcagatggaggcgcgcatcttgcgcacctgttcataggcggcttcggaatgcaggttcctggcctccacgcgcacgttgccgctggacctctccacggaggcgcccagctggcccatgatctggaccatgaaattggtatcggagacatccggcacacggcgcaccaccacaggctcatccgtcagcagggatgcggccagaatgggcagggacgcatttttggacccgctgatattgacggctcccctcagcgtaaaacctccgtgtacaacaagcttctccatagtgggtggcaattaggtgacggattctacacatttgagacgcccatgcaaccccaaagagcccccggaaccggacaatttcccggacgtttcccttcacggaaaaggaggcggaaaacatcccggcaaaaaagacaggggccgatcaggttctgtaagccagattttgtccaccggccaaagccggctgtgcggtcatttttctcacgcggtctgcggtgaagcattccgcgcgcccgttcgtcttacggaacggatgcgactaatacccggggatccggcgggcaggcaacccttcccctgtttgtcttgcatcgcgcggggtttaccatgcctcctcggtcgccctcggagcggtgagctcttacctccccttttcacccttgcccgcatggggatgaaccccatccgggcggtttgttttctgtggcactttccgtccgggaacccttgggaggttcccgtctcccgctttcacgggacacgctgccttgtgatgtccggactttcctctaccccggtccgaagaccggaacagcgaccacccgaacctgatcggcacggactacatacgctttcagcggcgcgcggtaaagcccaaagcaggacggagggcatttttgttcccttgcttgttctcatccgggcttaggaaatcccaggctccttcaggcacgcctcatagcacgctttgttaagtgccttgcaaacggcggtattgccgctcgcggcaggtaccggatgaaatttcttttctcctggggcatgcagaaaaacggccgcctcttccggctgaagagaggcgcctttagcccatccttcctttaagaggattttggccagggattccaccttgtaggcgtcgcctttcagaaatacctttttaacagggtactgcttccccagcgcattcgcatataaggcgaacggccttctctccacctccactccgtcatctttcaacgtgacgtcgtacacaagagcaccgatgctgacatgtacggccgcttccgcaacgggctgcacggattggcgctgggaacaggcggccacgacgttcagcgcggtacagagaaagacagtccggacaataaagctcatcagccttttttattccatactgcattgaatgtcaatatcgaataatcctttgaaacaaagtaaagcggccacaggatcactcccgtggccgctccaacttactacctatgaaaaccagcttgatccattgatcctgaaaagctctctccttcctttcaggcggatgcagccgataacgcgccttaatatacgtcaccgttccggaaaatcaaccccattctggaccgccgcccagcgccttaccggagtcccggcgctatcctctcccctcccgcccgtctcgtaattggcttgattcagcggccaatacagggtagttcttccggacgtccatgaaccttcgctcccattccatttcttccctgcaaggggtactgaccgtacccggagacaaaagcatttcccaccgcgccgccatcctgggcggcctggcgaagggagtgacggaagtggataatttcctgtgcagtgaagactgcctgaataccctgcgcgccatggagcagttgggggccaaggtggaagtgctggaagaacgggaggggtatggccccgtccgcttccgcataacgggcgtcgccatgaagcccgcggctccggaacggcccatcgactgcggcaattccggcacgggcatgaggctgctggccggcatgctggctgcctgcccctttgattcggaaatgttcggggacgcctccctgagttcccgccccatgggccgcatcatgcagcctctggaacagatgggcgctcggattgaagcccgcggcgccaagccgggctgcgctccgctgtttatccacggcggccgggtgcgccccatttcctacacgcttcccatggcgagcgcccaggtgaagagcgccatcctgctggccgccatgtttgccgacggcgccaccaccgtgcatcagcccgccgtcacccgcgaccacacggagcgcctgttccgccatttcagcgtgccctgcacggtagacggcctcgccgtcagtacccagggtccggcgctcccagccgcccatgacctgacggttcccgcagacatctcttccgccgccttctggatggtggccgccgccagccgtcccggctcccgcctgacgctgcgccaggtgggcctgaacaacacgcggaacgccgtcatcagcgcactgaaacggatgggggtgcggatggacattgtgaccacttctccggaggatgcgggcgaaccgtacggggatattaccgtgtacggttcggattccctgcacggcaccagcctgcttccggaagaaatccccaacctgattgatgaaatccccatcctggccgtggccggagccctgggccagggagacttcatcgtccgcaacgcccgcgaactgcgcgtcaaggaaacggaccgcatcgccaccacggcggccaatctccggctcatgggggtggacgtggaggaatttgacgacggaatggtcgtccacggaggcgctcccctgaaaggcgcggaattgcccagctacggagaccaccgcatcgccatgagcttcctggtggccggattcagcgcacagggagataccgtgctggcggatgcggaatgcatcaatacctcctatcccggctttgaacgggatctggcgcagttcctgtaaacaatcctgaagaagcgccggaggcttttattccttttccacttccctggcacggcacaagtcccgccagccggggaagttccatttgttggggaagtcccggcactggcgcggtttgacgggattgatccggcagccgccttccgccagcatcatgcaggcgccgtcctccgcatcccggatggacaatccgcgccggttggccctcaggcggcagcattcgtcaatgaaggcctgctcgtccatgtggaggaaacgggagatttcccggacttcatcctcctcaatgcacacgtctccggcccagcggcagcatgcgccgcacctagtgcattcataccgcaccgcctttccgctttccgccatgcgcctttaagtgaaaattcccctgatgacgcctatgttcatgtgggcgtccctccaccgcgggttgttgacggcggtttcaaagtcctgcggcagttttccgatggtgccgggagcctgcgccagcccggtcagaatctgcctgattctggagcgggcgatgagggtgggctggttggtccattggaaaacctcactgtcaatgatgtagccttcatcaatcttggtaatgtattcgggaaagcgcagatggggattttgttccacataaacgcatcggccgatggaacgcttggagcggaaaggatggaagaagcgccggatgctcttgatccagtccggtgcttccgacaggccttccgcatgcacccacatggtggccagctgctccacgggataaaagtaggaatacgtataggcggccttgtagcgcgtgcagccgcgccaggcatgacgcaggcgcaccatgtccgcctggccggaaatcagcagctccaccgctcgtttcaactggttttccagagtttccccgcgcaggtgctcccagatcatgcagtcatcctcagccagcagcacgtaatccgtatccagcgcgttgaccgccgtatggagcgcccctatgaagccgccctccgccggagaagactccgcggaaagtccgtatgaaagcgccgtttcacatactttgccagcgctttccggaaaaacgacgcaggcctcgtcaaaataattcagaagcccggacctctcataggacgccagcgtcatggccagcgtatacggggcattatcacacaacagggccaggccgatttttttatcttgaaagagaattcccatcacgtagaacgtttttgcagtctaagacaataggaagcccgtttccaagcaaaataattttaaacaaatgtacttttatcccgccgcttttcaagcaaagggaaaaaacaccccaccccgtttcaacatcatgaaagcatacgttattttaaaaaactcgctgctggcagccgccctcggatgcgccctgtccagttgctatgatccttattatgacagtttcagcgtatcaggctcctacagcagcggcggctccggcatgtcctacatgtatgacaactccggctatcccatttacggatattacggaggcaggcccatctatgcctatgacacgttcggcagccctatttattccatcagcctgatccgcccgaattactacatccccacgtggggaccggccccctattaccgcgggcactacatccgcccacattactgccgccccatggcgcgtccgccgatgaagccccagtacaggccggatcatttccgtccggaccaccgcccgggcaacaacaggccggttccgcagcccggcaggcccaaccaccgcccggacttcggaaaacccggcaattcccaccgtccgcccgtaagtaatccgggcggcagccataaccggccgggaataggccagcccggcggcagccacggcaggccggacttcggaaagccgggacagccctcccgcccgtccgtcaacaatccccaccgccccggctccggcaattccgggagcacgcatcgtccgggcatcagccgtccggaggggaaccggccctccaggcctgacttcgggcgtcccagccgtccatccacgccctcctccaggccatccgcctcccgtccgggtcattcgggcatgaaccgtcccagcagccctccatccgtttccaggccttcttccccgccgccgtccgccagcgcgcccagcaggccgtcttcgcctcctgcggctgcgccgtcccgtccgtctccctcaccacggccttccggccccggaggctcccatggaccgcagaggagataatccacccctgaaaccctgaaaggttctccccatggggctgttttgagcaaggcgggcaaaccggaggaagacaagccccggatcatgttatgaaccgggcctccggccagcaggagagccgaaagcggacaaggaaaaagggtactttaaacaatatgcgtccgccttcctggggtttttaaacattccaggacatcccgtaccgcagggagaaggcggccagcgaacaaaggagaaaaggacaggcccttccctgtgaataagggatggaacgaaaagacgttctattgttttttccagcgtttcagcgtgggaaaaaacagggtcatttgggcaatggcttcctctttcgtgtaggaggaaccattctccttgttgaattcctccacaaaccgggcgcaatgttcaatcatctgctccatggtgcattctgacgtaaatgcgccgtcctgaaagcaataatggcaatattcctcactggaggttccgtcatggttggtgccgcagtcttccctgcttcccagaggcatgccgcagctttggcagaatggagtattcataaaaggaaatggttcttgaaaaataaagagggtgaggaaaggattaaaacctgaatgacggctgatttaaagaattttgtttttccggaacaggccctcatgccctggaaaggggaatcctgagggcaaagcggcatccgtgggaactttcttccaggcacaagtctccgcccatgcttctcgccagttcccgggataaagccagccccagccccacgcccggctgttttccggcggcctcctccgcggatctggaaaagggacggaacagcttccctttcagggaatcggaaatgcctttcccttcatcctccacacggatgaccagaaaacgcttttcccgtgccagttccaccttcaggacgctgccgtcaaaacatgcgtatttggcggcgttgtccgccagattgtacacgatctgctccacggcggtcatgtccgcagtcacggcctccgcttgcagctccggagccacgtaaagctgggagtccatgcccgcggcggccagccggggggagatgcgggcaatgacggcggaggcgaggtccgtcaccggaattttttccggctggagggagaccgaatttttctccacccgcgcgtagctcaatacgttgtccaccaggtgcgtcagcctgcccgcctcatttttcagaatatccacataggccatttccctgcccttgggaaccagtccggaagaaagcatttccgtgtacatgttgaacgtagtcagaggcgtccttagttcatgcgtcacggcggaaacgaatacggcgcggcgttcgctcaggcggatgaggccgatcatgaagccaatgaccccgcacagggccagaagcccgcaaaaccacgccatcgccatggaattccagaccgtccgcagggaattggcgggcatggagggaagattgcccggattcagcatggcgggaattccggccagggtcagatagctttcctcccgcccgtcggcgggagacagggtggcctccggcaaaatatcggctacggactccagcaggtaggcggataacttgccccagtccagccagattccctgcacccatacctggccgtggtccgagatgcggcgcgtcaggaaacattccttcccctgctgccatctgggctggagggaggaaatggagaactccctgtaactttccggagttttggcgaacccgtcacggcgggtgacggacatttccgccaggctttcctttaccggaaccggattcgccttttgttcatgaacctcaaactggaccatcttcccgtccagagtcaatgccgcggcacccatatccaggagagccgcaatatcgccggccccgctttccaattttttcccggtccttttcaaggaaccagccacatccaggcaatccccttccccttccggactttccatgccattcacctcccctgaaacgaccagccgtcccgaatccgcaatctccttctttgcccgccggggaggctccatggctttctttttcaccttgacgctgacattgtactcctgctggctgttggaaaggtttttacgcatgttgtagtcttccattccctgctggaaagccttcctgctttccactgccagctcctgctgcaagccgttcttctgctgctcccttccatccatgatggcgacggaagtcacctgtaccgcttcttccgcagggggggcggtctccggctgcacggcattccccgcggagatggaggcaggcctcggcaaattcttcatggcatccaccacacggctgccccagccggatcttcccagttgcaggacatattccagccgttccctgtccttctggggagaggaaacgtttccccgcgggtctatctggaaatacagcttggcaaagccggacaaatccggcatcgcaccttcctccttgcggacttccgccagcgcgttcccctggaaatattctccgggagaacggttgttctcccctgcgatcatggaggccagcagggaatccatgcgccacagggccaggcggctctgctccaccaggcggatctggtgcgtttccgccagcctgcgcttctccgcatccagcatggaatggctgagccatcccatcacccccagcagaatcagcaggcaggaccacaacagcaaatggaaggaaaaacggctgctcatgctccgtcctcccaaacatatccccgccctctcagggtgcggatgacggcggagttccttttccccattttttcccgcaggcgggcgatcgtggtgtcaatgctccgcgtttccaccagccgggggtccatcttccagaccctcgccaggatttcctcacgggtgatgattcttccggcattggccgccagatggcgcgccaggtcaaattccttggtggtcagcaccacccgctcctcccccagaaccagggcgcgggcggcaaaatccagatgcccctccggcagcatgacgcggttgacggcgctaggcctttccggggaccgcctcagcacggcctctatcctggccagcacttccagcaggctgaagggcttcaccacataatcgtccgcccccagcttcagccccttcaccttgtccgcctccgcgcccttggcggtgagcatcagcaccggaacggtggagcggtcttccctgatgcgtttcagcagttcaaaaccgttcgctccgggcaggactacatccagcagggccaggtcatactcctctgcatgaatcatctccatggcctcataaccgtccctggcggacaaaacgtcatagccggacaccgccagggcgtccgccaggccgtttctaatggcatgatcgtcttctacgaccagaatgcggtagcggtgcatgtgcggaataatctatcaaataggaacgttgcggtaaaacaggttttttcagaagaaaaattctgcggggccgccggcactcccggacagccccgcaggagcactcatttcttcactctatcattcataggggaatcttttccttccgtttcgttctcttcaacaaaggaaaactgctttttggaggcctgctgccggacagcctggataatggcgtcctccagggtgttcggtttggcgtccctggaagcgctctgctgcttccatttggccagccattcattgcgccgggcgtccagctcctttaccttcttctgcagggctccgcgctcctccgccttctttttcacgatggcttccacttcctccgcggttttaccttccagttccttggggagctgcccggcagtccccaaatctcccagcgcctggactccgttccggtcataaaaatccaccaggtcccatgaagtattggagtacgccgccttgttcgccttggcgctggcccgccctacggcagccgcaggcgacagtttcagcgccagcgtatcctggcgttcctgcttgctcagcctttcagcctgaacttccggtgaaccgtaagccaggtaagtcgcattcagggaggaactcaacttggcaagttctccgtcaaagggcgtttccgggtccgggggagccgcgttgtggtcaatgttgagaaagctgccgtccccctttttagctccgtccttccacaggcgcgtatccgagtctccggcattgccgcaatgaatggtattgacggtaatgcccctctccagcccgcgcgcaatcgcttccgcatacggcacgctgccctggttgaagggttcattgccggcgatgaagaccagcttcagcgcatggggatcatccgtattccattttaactccttcacggcccggtcaatgacggctccgcagcattccgtgccgccgtaggttttcagcttgaacaattcctcggagaccttgtccaggtcatccgtgaacggaagcacccggcgtatccaggcgtccctggaggacagcccgtcgtttccatactcatacagggcaagctggatatcgggcaatttgccgttctggcgcgccagcgtcatgtcattgacaatcttccacaaataagtgcgcgcctggtcgatgaggccgttcatgctgctggaggtatccagcaacagggcaatctgaacgacggcgcggtcatctttttccgcggcgccctggacgggagccgcaggagttccggaggaagcctcctcctgcttcggcgttacgctgatctccgcctctccgggagccgttctgtccgcaacagtgacggaataggcggcgtctttcacccctttgacattccccgtcacgacagcccgggtaacgaccacatccccttttgcaggaacggccgcccctccggaagaagttttttccagaccgggagccacgcttatggtcagcttttcggagccgctcccttccgttttgatggaataggccgcttccctgaccggttcaaccgcgcttggcttgatacggaaaataccttccttcccggaaccgccgggaaggcttgccgccttcctggtgatgaacacccctttctgcggcggaacggctgaaattccggaagaagctccctccgcacgcggcgtcacacggatttccatttcccccggagcggttcctttcaccgtagtgacggaataggcggcattccgcgctcccatggctttctccggaccggcgttcacggccttcgtcaggacaaccccgtttccggtggtggtcacggtcacggctgatgcggatttttccgcgtccacgcttttcaccgtaaccaggacggttccggttttagcgtcctgtttttccccctccggtcccggagtgacggagtatctggcctttccttccggaacaggcttgccgtccgttggaacgggagtgggttcggcctgggcgcagaatgatcctgcgcccagcaaccctaatgcagtacatgcgatgatacggttcatgattgttgattactagttgtttgtttatggaaaactgttttgcatcagtacggtttctccatccaggagaatcatgacggagccatccagagccaacagcccctggcggttggactgaatgagcctgttcgccacgtcggcatattccggcgtgcccacctggaccgtcttcacggcgcggcccgcgtccgacatggcaagaaccgtgctttccatccagactccatttctgttgaaatatccgttctgggcaatctgggccgtattgtcaaaggccacggcacggccctcccggtccatctggatgttgtacttgttgagggtcagttcccgcttcttggctacggcattttcctgcagggcaatggcgcccagcccttcgcgcaattcctccatcaccttcccctccaggttccccctgctccccatggaggcatgatcccgccgccatgggccggaactgccgtcatcggcaaaaaaggaggctgccgagctcatgatcccgaagtcccgtgaaagccgcatgatttcctccaccaattccgccgttttggaattggacctcagcgcttccgtgccgggggagctgccgcccatatccatcagagcggtttccagactgcctatcttgcgcgcggcccacagccgggctacaaaatcatccttcatgctggcgatgcgctgcggatccacggtaatggcaaaaacctgctccctgttatcccggtccaggcaggtacccttaatcaggaaaggttccgtccctatgtacctcccggccagaacggcgggattgccggaataaatgtccggaagaaccccggagggtatggcgtcctgcacccttcccggctgttccctgccgtccggggagcagacggtatagcgcaccttccggaagacggggccgtataactgccggaatacctgcgagagcttgacctccagattctccccggaaaggatgtagcacggtagccccccggaaatctccgccatgcgcctcagcaggggggcgttgacgtcctcccccaccccgatggtgaaaatgcgcctttccgccctgtttccttcccccgccagggccgcaatggatttttccgaagtgcggccgatcgtgggaaggccgtccgtcaggaaaagcaccacggggagcatcccctcgtgggaaggctggctcaaggcggcggccagcgcctcgtgcatgttggtgcccccacgcgccacgacggcatccagccatgcatgggccgctttttccgacgcgccatttttttccaccggggccgcttcaaataaattgacgccttcattataagtgatgatattgaacctttctccgggattcaggccggaaacgatctgcttggccgcctccttcacgctggcgagcttgttcccgcgcatgctcccggacctgtccagcaccagcgtgacttcccggagaatggagtgttcaccggggcggacatccttgcccaccatcgccagaaaatagccgtttttcccgccggaggcgtcaggagaggcgtaaacgctggcttccggcccggaagaagcttcccctttcttcccgcgcgcctccagccatgacaggcggaaagggcccgggttcatcctttcctccgccagggtcagaaccacggttccattctccagctgatggcgctccatctgatgggagggagtgaagaggttgcccggaccgtcctttccggaagcgagctccaccctcaccgtccacggagcatccccggaaagagcttccgttctggggagcacgtaatccagacgcccctccacaggggtcagcagttgttcgtaaacaatccccagctttacggaagacctgggcggaaccggaaacacgctggaccggatggccccgaaccccgcaaattccagcagggccggatcctttctgcgcgccacaatgcggtcatacaggcgccgcgcctcgtccgctggcatcagggaggccttccactccgcttttccgtccccataataaaaacctttcaccaccacgccctccggaacgggcagcagcagctcagcctccgcgggggaagaaccgttattccgcacatccagctccagggtggtcacggcggagcgtccattcaccaggatgcgggcattcaccttttccatcgtgaccggctgccggaccgtccggtccgccggaagaatcacgcgcctctgcggcagaatgatattccgggcgcccagctcgtcgcggatttcctgggaatgcgccagtccggctattcccgcccatacggctatcaggcaccacgtgatgttcatgtccccatgatgcctgaaaaatcaatcccgtgtgttacaatcaggttacattttcaaagaacctttccctgccgcggaaaataataaaaaaggccgcctgcccggaggggaggcggcctccggcattcaactgccggagaacgttttttaatgcatcagccccatggacaggagcaccagggtcacgatgcctatggcgatgcggtaccagccaaatacggcaaaactgtgcttttgcaggtaggaaaccatccacttcacagccagccatgcggacagccagctcacaaccgttcccacggccagggcttcccacccgaaggattccagcatcagcgccccgtccttgtacgcatcatggacggtggccgcgcccagggtaatcagccccagcaggaagctgaattccacggccgcctccacgctcagccccacgaacatgccgcccagcatggtcatcaggctccggctggtgccgggaatcatggcgacgcactggagagcgcccaccgtcagcgccctggccggggtcaggctctcaatggaggctccggagttcccttcattggaacggccttccctggcgcgccaggcgcagtacgccagaatcacgccgccgcccacaatccaggaataagccaccgtgtaggtgttgaacaggtattccttgatcagggaggcgcagcacaggcccaccacggcggcggggaggaaggccagaatgaggttgaccagcagtttcagcccggcgggattattgccgcgcacgccctgcgccatggccttcacccggggaaaatacaggctcagcaccgccaggatggcccctccctggatgcagacggccagggcgtccagagcttccttgctctgggacatgttcagcagggattccgtcaggagcaggtgccccgtggagctgaccggcaggtactcggtcaggccttccacaatgcccaggatgatgatttccaggagattcatgataatggcgcgggttggatgtatttactggttgtagggagaattgttgttgtcaaagtcttcttcaaaccgggcgacttcctcccgtgcgcgtgcggcctccttgcgctcatgcatccaggccaggatgatgcatatttcatacagcgcatacatgggaacggccatcagcatcatggtggccacgtccggcgtgggggtgatgaccgcggccaggatggcgatcgccacaatggcgtagcggcgcgtggccttcatcatgtcgtaggtcagcacgcccagcttgacgaaaggcatcaccaccacgggcagttcaaacgccaggccgaacatcaggatcatctgcgtagcgaaggacaggtagtagccgatgcgccattcattggaaatgccgaattccagggaatacgtgtagaagaacgtcagcaccctgggaagcacgatgaagtagcagaacagcgtacccgccaggaacagcccgaagccgatcgccatgcacttgtacagcagcctgcgttcatgctccagcagtccgggaataatgaattgcagcaggaagtacagcaacagcgggaaggagatcaccaccccggcatacagggaaagcttgatggtcagcatgaacgcctcccccggctggaacgcgctcatcatcttaagggcgccccgcccggtgccgtccgtcagaatggcttccttggcatccagggcctccgccagctcccgcacggaggaggtggggctgccgtccctgataaaaatcttcttcctgtcctccggcaggggctgcgcgccgcggagcaccagggcggcctccgtcaaatccccctgggacggggaaacctgccgcagaagcaatttcttctgggagtcgtccaggctcgtcatggccgtagccatttccttggccttcccccatgcctccaggcctattcccgcgggcaggtgggattcctcaaacatgtcccacacctggttgacgggacgcctcaggatgtccatcagattggacgcaaacccggcgcacagaatcgtgctgacggtcaggcacagcgccatcctcagcagcatggtccgcaggtcatccagatgctccagaaagggcttttcctcatcatccctctgaatctgccacttctcccgcagacggaatatgtgctttaaaaagaacacggcgttaaatgaagcctaaaagtcccttccaggcaagccgcaaggccgacaacgcgctaaaaaaagcccgttgcccctccccgccgccgcagccccgttttttggcatgcaccccctgtatctgcttgacgcgggcaggctggcccttactctcttacccatcatgagtcacgtcagaacaagattcgcaccttcccccacgggctacctccacatcggcggcgcccgcaccgccctgttcaactggctgttcgcccgcaagatggggggcaccttcattctccgcattgaggatacggacaacgcccgcaacacggaggaagccacccgcgcaatcttcaccggcatggaatggctgggcctggactgggatgaaggccccatgaagggcggcgactgcggcccctacttccagagccagcgcaacgatatttacgacgcctatttcaagaagctccaggatgccggacgcgtgtacgaggacgacggcgcatggcgcttccgctttgaccgctccaagcccgtcaccttccatgacctgatctgcggagacatcaccattgactaccgggacgcttccaacacgccggacatggccatccgccgggcggacggctcctacatcttccacttcgtcaacgtggtggacgacattgaaatgaagatgacccacgtcatccgcgggaaagaccacatcatgaacacgcccaagcacatccaactgtttgaggccttcggcgtcactcccccggtcttcgcccacatgccgctgatcctgaaccaggacggttccaagatgtccaagcgcgacgtaggcgcggccctgggcgcgtatccggaagaaggcttcctgccgaaaggcgtgatgaacttcctggccctgctgggctggtcccccaaggacgacacggaaatcttctccccgcaggagctcattgagcgcttctccctggaagccgtcaaccactccgccgccaaatttgacatcaccaagtgccgctgggtcaaccagcagcatatcattgcgctggctccggaggaattcacggccagggcgcgccccttctgcctgaatgccggactgccggactccccgattctggacgccgccatcgccaccgtgcagacgaaggtgcagacgctggcggaggtgccggacaaaatccgcttcttctttgacctgggcatggacccggaagccgttgccaaggtccagccggaagccctggaactgctttccaaactggcggacaggctggagcgggaaccggaatgggacggccatgaactcatcggcgtgctgaaagcctttgccaaggaaaacggcatgaaaatgggagccgtcatgttccccgcccgcgtggccctcaccgggctgagcggcggaccggacctttcctccgtcttctccctgctgggccgggaggaatccgtgcggagaatccgtgcgttctccctgaactgattcccgccgggaacggtccttctttcaaacgctccggacatccctccggagcgtttcctgtttccgtcaggacaatcccaggaatgcggagggattggccgtcatcagctcctgcctttcctgctccgtaaacgtattccggaagttctccatgtactccttcatcccgtccagaaaaagaaggttcagataaaaatcgctcccgaacaggaatttgcggcgcacctgttccggggccttgagaaagtactcccgcatctccctgagcttcgccgtctccgtgatgcaggacaaatccgtatgaagtccgggaaacttctccatcatgccgtaaatcagctccgtccattccatgccttcgtcctggcagccgaagtgggccaggttcagccggaggcgcggaaaagcctccatcaccttctcccacagccggggatggttcaggagttccgccttctccttcacccgcagcttgtccgtcaggcggtagtgcctgaactccagaacgccgtcatgcggaacaacctctccattccggtaaacatgcccgtgcaccgtgatggaagtggaaaaactggcaaagccgccgccggagcaatgggccgtcagcggcgccccgtgccgttcgcaatactcatacagggccatcagcgccgggtccgtaggggaatagccgttggggcaatacagcttgaagccgtaaaaaccgcccttccctcccaattccggaaccagcctgtccgtcatgggggaaatgtctatcgtcccgtccggaccatgcagccagttgccggggcggcgggggtccaccacgtaaaacggaagcacgcggccgggatgcgccgccgccagtttgagcagttcttcttcctgcatccggaacgcatcccgtttccccaggggaagccgttccgtctttctggacaggcggcggagcgcctgcttcatctccccgatttccctcctgtcccccctcccggcctgttccgccagctcatcaagctccttccggagcacggcccattccttccgcgcctccctttttacattcctcttgcaggccttccgccgccggagcccgtcagccccatcggcgcccttcatgcagtaatccaggtcaaacatcagcggcacgacggtattgcagccgccctccgccagcagcttgccgtaaatgttctccgtatccatcaagcccgtcttgaaaaaacggatgatcctcttcaactcgctgatgcctcccgccgtttccagacgcgcccgcgttccccgtggacgcatgcgggaaagaatgaaatccaccaggagcctccaggaaaggacctcgtggttgaacaaatggcagtgggcgtctatggttaaaatttccggctccttcatacaattcatgaaattatttatatattacccaatattccgttaaaaaatcaatcatgaaatcaataagggccacccgccgggcagggaatgccggtttctgaaaaaagtggccggacgaggctccggaaagcgcgcgccttccccccgcaaagccgtctcaggcagcgggggaatataaccttgaccgtgatgcccccagcccctagaactggaaccgttcatgagcatccctgattaccggacgtttttccgctgctgcgccgccttcctcctggcaggtgtgctggccgcgggccatgctgcggcacagcaggagggcgcgcctgccgccgttccggaacaggtgcaggaaccagaccccgagcagccccaggcagagcctgaccactcggaaatggacaccgtcatcatggccctgtgccatgaaatcaccatcctgaaaaagaatgaggaaaaaaggatggccatccgggaggcgctggtgaaggaggcggacgccacctacaattactttgacaccagggtgtatgaaatgtccgccgtgctttacgccctggacgatcagaaaatcttcacgctggccttttactgcaaagccgccaccagcctggtcaagacgtattacgcccaaaggccggacttccagggacaggaggaacggctggacaaggaaatagggcgcatcaaaaaactggcggaatccctggaggaagtcaacacggacaacctgtcggaaccctccctggtgcagagggacgaggccctgtacacctgccgcaccctggaagaatccctgctcaaggaaaaggagcagatcagctacctcaaggagctcttcaacagcctgggcggcaagatagacgccctgaaccatgaaagcggcaagctgttcacctccctcttcaaccgggtattctacacgccgtccaacgcggcccggtacatcttcctcaagccgctcaagacgtatgaaatttgcatgggggcctgggaaacgtccgcagacagcaagctccagctcccgtcggacccggaaacgctcaagcactacgggctcatcctgctgggcatcgtcctgtgctcctactgcctttcccgcctcatcgtcttcctgggcttcaagaaaacgctggaaaagacgggccactacaacaagcgccacgccttcaccaacgtcaccaccatcctcatcgtagcgatcgtcctcgtcatcgcctccatgcgcacgccggactacctgctgaaaagcgcggcctccctgggagcggaattcctcctgctggtcagcgccatcctgttctccctggtgacgcgcctcccctacggcaccattaactccggcattcgcatctacatgccctacctgctcctgggcggcttcttcatgctgctgcgcatgttcatggcccccaacatcatcgtggacatttccatgcccgtcctgttcacgctggtttccctcttctccctgctgacctgggtgcggcagcggcacaagcttccccgtctggaccgcttcttcgccaccgtctccctggtgctcaccatcctgggcagcggcctgtgctgggccgggttcagcttcatggccttcctggtgctgatgacgtggatcatgctgatgaccagcatcctgctcctggtggggctgtggaacctgctccaccactatgaaaaccgccggaaggaacggaacaagcaggcgatcctgtggttccgccccttcgtctccaagctggtgctcccctgcctgaccatcttcctcatcctgttcagcatcatctggcccgccgccaccttcgacatgggggacctcatcatcaacaaaatcttcgccaccacggaaatcaaggacctgctcaccttcagctggagccacgtcatcacggtcatcctgattgccattgtgctcaactacctgatcttcatcggtaaaaacaccctgcatgaagtctatggggaagactatgaagtgggcatcatccccaccttcgtgacgctttcctccctgttcctgtgggggctcttcgtcttcacggccctcatcatcatgaacgccaactacaacgggctgctgatggtcatgggcggcttgagcatgggcatcggcttcgccctgaaagacactattgaaaacatcatcagcggcctgtccctgatgctggggcgcctgcggcagggggacatgatcgaatgcgacggctaccggggccgcgtctcctccctgggctaccgctccaccatgattgaaacgctggacggctccatcatcgccttccagaactcccagctcttcaacaagaacttccgcaacatgacccgcaaccacaagttcgaatgctccaaggtggaagtgggcatctcctacggaacggacgtggagcgggcgcgccaaatcgttctggaaacgctgtcctccctgcccttcctttccaaggtgaaaaaaaccagcgtggtgctggacagcttcggggacagctccgtcaatctgggcgtatgggtctgggttcccgtcatgacgaaggcctccagcctttcctccgtgcgggaacacatctataatgcgttcaacgagcacggcatctccatccccttcccccagcaggacctgtacgtgaaagaattccccggcagggaacccgttcaggaaaaagacgccgccgcgcaggaaaactgaatttccactacaacacaacatcaaccatccatgtccgaacctctgactctactcggctcacaaagctccttcttcaccagccctgacgacgccaagctggaatccttccccaaccgcggcacgcgtccctacaccatcacgctggacacccatgaattctcctccctctgccccgtcaccgggcagccggactcctgccacctgacgatcacctacgttccggatgaaaagtgcgtggaaaccaaatccctcaaatactacctggcctcctaccgcaactacccggccttcaacgaacagatcgtcaaccgcatcacggatgacctggcagccgccatctccccgcggtggctgaaagtagaaggccgtttctccccccgcggcggcatccagctgaccgccatggcggagcacaacccggaaaaccgccccctctgacgcgcgccatggataagacggaaaccgccgtactgctcagcggggggctggactccagcgtagccctgcactgggcgcaccggaaccaccgcgtgcgggtggccctcagctttgactacgcctccaaccacgcggaacgggagctggaatgcgccgcctggcaggccgccagcctgggcatagagcaccgcgtgattgacatctcccccatctccgcccatttgaaatccgccctcctctccggcgcggacgacatcccggacggctcctatgacgaggagctgatgaagcagaccgtcgtccccttccgcaacggcatcttcctgtccatcgcggccggggtggcggaaagctgcggagcgcagcagcttgtcattgccgcccattccggggaccacagcatttacccggactgccgggaggaattcatggccgccatgacggaggccgtccgcctggggacctatgccgggctgggcatcctgcgtcccttcatccgcacgtccaagggcggcatcgccgccatgggccatgaactgggcgtggacttctcccgcacctactcctgctacaagggaggtcccgtccactgcggcgcctgctccacctgcgtggagcgccgggaagccttcagggaagccggaatcccggacccgacggtttatgcgcctgcggcgcagcgaccaaataccggggattaaatattaagggaaaattcccggcctccggccagtggaatacgcctattcactaatcacttcgggaaaattcccggaaagggccttccgcactcttgccgccacttcctccttcccggcgtccgcgtccacgcggagcatccagggttcatggatggaggcgaacacgttgcggcaggccgtcaggcccgcttccgtctcaaaggcatcgcgttctccgcggctcccgatgcgttccagagccacggaaacgggaatatccagccagaccacggcgtccggcaccggggcaaactcttcattggcagcgcggatgacggaagtatccaccccacgcgcgccctggtaagccatcatggaaaggtaatagcggtccagcaacacccacgcgccgcgcgccagcgcaggggcgatcagcgtctccacatgctcccgcctgtctttcaggaataattctacctcatcctctacggaaaggcgccccgtcacggcggaatcccgcaacatccggccccacggcccgcgcgtgggctcaaagctctgcaccacttccagccccttcccctccagatacttccgcaactggccgatgtgggtggacttgcccgtgccgtctatgccttcaaagacgatcaggcggccttttctctctccggtaaaactcatgactcaaacgtataacgctggcccggaacgggagcgatgatggtggaacccggcattctggcggacagcgtatcatgcatccactccacggcatccggatcaccgtgcaccagaaccacctgcctgggattcagcttcacggcataattgacaagggcgtcacgggtagcgtgcccggaaaagtcaaaacaatccaccgtacagttgcggcgcacgggctgcccgttgggccgcatcttcaccagatccccctcctgcgcggcccgcagccggcccgcgggggaatccgggtccgcataccctacaaaaagaatggcgtttttctcatgcggaagaacctgctccgccatcacgttggagagcgtattctccgtcatcatgccgctggaaaccacgtaaatattcccgggggaacacaccagcggggcttttcccttgcgcggcaggggcacggtctttatttcctccttcagcttgaactcatggtcgtgcctgcgggtcagcccggcaaagcggtcgtacagcagggaaaccttggcgctcaacccgccgaagtacacgggcgtattggcggggatcaccccctgctgcttgaaacggtggatattgaacagcatctcctggctcttgccgatggcgaataccggaatcagcacggcgccgccgcgttccagcgtctccgcaatcgccttcccgaaccgcaccatctcctccgggcgggaataatgggcgctgcgctggaagccgccgcgcgtgcactccataatcagcgtatccacgccggattccgggaaatccgctccgggaatcatgctctggtcctcaaactgcacgtcccccgtataaaacaccgtatggccgctctctccttccagcatcacgcccgcggaccccagaatgtggccggcatcgtaaaacgtggccagcacgttctggcggaagcccacgcggaacacctcgttgcaggacttggcatgccaggcgtcgctcagcctgtccaggtcgttatgggtgaaaaagggatactccacaatgcccaggtccagcctcttggcgctcatcacattcacggaattgtgcagcatcacttcagacagggcggctgcggcgggcgtcatgaatacttccgccgcgggctgcttctcctgaagcacgggcagcgttcccaggtggtccaggtgggaatggcttaaaaaaacggcttccacggaattgggctccatggaatcaaaatccggcatggccgccatcccctccctcttggggtgcatcccgctgtcaagcacgatccgggtgccgtccatttcaagcaaatagcaattggctccaatctcctcggccccgctgatattcgtaaaactgatcattatatgccgcaggagagtaccccgtgccctccgccgtgtcaatgccgccttcatgtttgcgggagcgggacggccccgttcccgggaatggccgcgaatcaagggaaaaccgccctgtttcatcttccacgggatcattcagcccccggaatccgtttggctggcagttccgcacaaacgtccttagggcagcatcatttcataatcaatgtagtccccgaaaaaggcggtatggctttcgttcctccttttcccgcaaaccttgaaacctgcgccttcatacatccgccgggcgggaaccgagcggccattcgtggtcacaatgattcttttcgccccccttttcacgattctttgaagcgcctcccggagctgcatcctgccatacccatggcccttgcaggaggtgatgatgcagttgtggcctatctccacatattcgggcatcttcctcgggtcccacgacgccagcccggcggccttgccattcaagacggttataaaaccgtatcggtccgcaatctgcgggttatcaaagaaaaaatcatcaaactccttccagtctgcaccgcaacaatcttcccatctcccgtcaaaggaataggcgtccgacagtaattcaaacaacgttccccgcttaaagccgcttactttcctgaattcaatgtttccgtggttcatgaacaaaataattagggattaaggcaactgggagtccccgccggaagattctcctttttatcctgcaacaggcgcaatttgccgctccacggcttgttccggagaatgcgaaccctttcacaataggtatccgactccttctgcgattgcttcaggacgtccggattacgttggacataagccattcttgcatcgaagggaacgcttccctccagcaatatccagaaagtataatctataatttcataagcccagctcttttccagtgccagcgcctggttttcatccgtcatccgttcaaggatgccgatggacatttttatggatttaataatttgatgctggtagctttgtaaaactgattcctgcaaaagggaaagagcctggggggtgttttccttcaccagagagggagaagctcccgcatcacgccaccgccggggttcttcttccgctccggaggggatcaggaggggaataatcccgcagcagggcgtgcctcctgcagaagaagtgaaccccgcaggcttcttttccaaagccacggtcatcggttccggcaattcatgactgttgagggaaataatatcgatttcccacctgctccgcttgtgcatgactcctgtaaaataaacgggagccaaatggggtgattcatcattgatccagacggaagaatcaacctgctccctgccgctatcagggggagaactctcggcttcacctgccagcaaaggcgaaagcactgcaccgaacaacatgtacagagaaaacaaaaaccacttgttcatcagacgattccagcacatcgcaaaaggaagtgcaacaagattcggagaaacggaagcaattccccatggagccctttcctttccctgccgcgttctcttgtcggcacgccataccgtttcttccttccggcatctatttggtgcctgattctctttcccctctgccggtttgaatgtcatgaagggatattctggaaagaaggttctcccatataacgtatttgccgtaaacgttccactctcttttaaacggcaggacacatactcccagcggcatccgggaattgctctggacgcagccggaagcgcatgagataatttcagaaaagctccctgatgaaagaaaagccacccatcaaagacgattacaggcggtccctgctctatgttgcttcccagacaaatagccgggaggccatgattgtggcgctcgttatcataggcggtatcatcttctcctgcctgcattcatgccttttctccccgtaacggagcgttccttttccatttcccgcaacttcacccttgcagccccatgaaaaacaagcttcccattccacccaacgggcccaggcagcaattcctgaccagggccatcaattatttccgcagccgggaaggagaaccgcgccttttcactaaacgcaagcttgttctcctggtgctgacggctctttatgccttttcccccattgacctgattccggatttcattcccggagtaggccagatagacgacctgaccgtcatcgccttcacattcctggccctgttcatgcctcccctcaagaaggacggttcccatgaagacccggaaccctgagttcccgtcccgtacaacgtttcatgagtgataccccaccatcctccttcctgcattcccctgctgtcgtcgttctggttaaaggcgccgtcctgatcggggccctggccatgctgttctggggcgtgcggtcctgcatcaccgccccggtggaaaaaccgatggaggtggcggaaaagttgattgaagcaggcagggaggtaggcctcaccctgatcaacaaggggttttcctccgaccacggcggcgtggccctgatcgtgcagaaggacgagaaggtagccaacctggtgaccgtggaacggacgttcgagtatgaataccggtattccaccacgtggtggtggagtaaaaagacgctgatcctgaaagcggcctaccgcgcccacggaggcattgacctggagggacccgagccgctccgggttatcattcccgcagggaacaaaggacccattaccgcggaggggcttcacggaaagctggtttcctgcgagatggtggagggctccctcagaatcgtgagggatgacgccggcatctggaacaggctgacttccgaagacgccgccattgccgtcaaccagttgaacgaaagcgcccggaagcacatcatggagagcggcttgatacgccaggcggaagaaaatttcctgcgccgcctccgggaagaagccggacagccggaagaaccgcccggaaaggaccgctggttctgatactgcccgtacaagaggcttggcggccatcaagagctccatgatgcgcacttccccattccgttcttttatcttgccaaaacgggctggctcctataaaggaacgcacgtcatggccaatttaacattcacccctcccacggacggcgcagccgtcaccatgcagaacggcaggctttgcgttccggacaggcccatcattcccttcatcatcggtgacggaaccgggcctgaaatctgggcggcggcttcccgggtgattgacgcggccgtgaagaaagcttaccagggcaagcgttccattgcctggtatgaagtttttgccgggcagaagtcctttgacaacctgggtacatggctcccgaatgagacggtggaagccttccggacctacctggtcggcatcaagggccccctcaccacccccgtgggcggcggcatccgcagcctgaacgttacgctgcgtcaggatctggacctgttcgtctgcctgcgcccggtgcgctatttcaacggcattgaaactcccgtgaaggctccggaaaaggtggacatggtcgttttccgcgagaatacggaagacatttacgccggcatcagattcaaggaagggtccgaggacgccaaactgtttttcgacaccatgagccgcatcttcccggagcgcatgaagaaggtgcgcttcccggagagctccggcttcggcatcaagcccgtttcccgtgaaggcacggagcgcctggtgcgcgccgccattgattacgccgtggagaacggccgcaagagcgtcacgctggttcacaagggcaatatcatgaagttcacggaaggcggcttccgcgactgggggtacgacgtcgcgcgccgggaatacggcgcccagcccatcggagacggcccctggctgaagcttcccaacggaatcgtgatcaaggattgcattgcggacgccttccttcaggaaatcctgcttcatccggagaatttcgacgtggttgccacgctaaacctgaacggggactatatttccgacgccctggcggcgcaggtaggcggcatcggcatcgcgcccggcggcaacatcaattacctgacgggccattccatttttgaagccacgcacggcaccgggcccaaactggccggactggacaaggccaaccccagctccgtcatcctgtccgcggaaatgatgctgcgctacatgggctggacggaagcggcagacctgctgattcaggccattgaccaagtgatttccgcaaaaacggtcacgttcgacctcgcggaaatgattcccggttccacggagctttcctgctccgcctacggcgacaagctggtggaagccctgagctgaccttttccccggccactttcatccggctgccttcccggtacacggtgcggagggcagcctttttttgcagaggaaccgatacccgggccatctccatcaaacatttcaaataccatcccatgaagaagaacatgaacagaatgaacatcgtctgccttggagtcagggacatgaagaaggcgctgcaattttaccgtgacggactcggttttaaaacggatgagacgggcgaccatccggacgtcgtctttttcagcactcccggcaccaaactggagctgtatccgctggatttgctggcaaaggacatcaacggagagaatcctccgcccatcggcgccgggttcggaggaattacgcttgcctataatgcaaaaacgaaggaggaggtagttgaagtcattgaactggcgcggaacgcgggagccaggatcgtcaaggaaccccaggatgttttctggggcggcttccatggctattttgcggacccggacggctattactgggaagttgcctggggaccgaacgatgaatttgacgaccgggacatgctcgtcctgtaagccggaactatttaaataaaagggctgccgcacttggatatggtgcggcagccccgtcatgtttcctgggaaacggcgtcagtccgtcacggaaactcttttcattcagacgctccctttttccgtcagttcgcagggttccgacggaacggtccgttcaggcgccgcttcccgggatttccgggaaggcaaagcggcgggggaaagttccgcggagcctccggcaagttcttccactagggcggcaaccatgtccatgggccgtattggaccaggagcctacggaaacacaggagttccctaccttgatatgatcccccagggcggctccgacggacatggagcccgcaatggtgccccggtcatccctggtggaagattgataacctatcacgacattgtcagtgccattgtcgacgctggcatttgtcccgataacacgtttttgtccgaagcaatggcggacgtattttccaaattcatggaatggcatttgcctctgtttccgccgcgtattcaagaagcgtaaagcgtggaatttttctgcaaccgccctcctgcattgcttgaaaccgtgcagaaaaaacatgccgcgcggagagcggccggcaaccgtaatgacatgtgccgttacagctcccggcggatggcgtccatctgttccggcgtgtaggccgccttttccactccgccgaactggcggcgaaggaacgtgagcaggttcgccaggtcacgggaattcgtcacgccgggcggcagcatggtggaattccattccttcccgttcaccgtgatcggcccggtcagcccctggaggatgattttgacgatttccgcatcaggcttttccttcagccattcggacccggccaggggcggataggtcaccttgtcccccatgccgtcgttgccgtggcaaatggcgcatttggaaaggtacacgccccttcctttttccatgacggcggccgcacgggctcttttcaggcgttccatgtccaccgtgggaggatgggcggcatagtccggatgaatgtgggacaggccaggaaaagaatgaatccggtcgcgtttccgggagggttccactctcctgagggaagcaagatagttcaacagccgttccccgcgcccggaaggcaccagttcccggccctgctccatccggacaggcagggcatccagggaaggggcattcccctccaccgggcgttcttcaaacatgccgggcatggaggggcacacggtccagggctttttaaactgcggttcccgcgggttgtaaagatgaagggccagccattcccttacctgcgcggcgcggcgcgtgccgccggataccgcgtcttcatattccagcctgcctgcggcgtattccgccgcattgctcaaatccggccctaccgccgccacgcccgcctgcggagcgccctccccgttgaattcggcatccatgtcttccggctcgctgacccggtaagggaaatccgggtccgtgccgcggtcgattgccgtctgccagtccttcccggacatggaacgccggatgatctgggtgtggcacagggcgcacccctcagcggcataaatcctggctcctgccgcatcctggacgggccgcctgacctccagtgagtccggcgcgggagcatgcagcaggacagccgccgccgtagccagcaacagaacagccgcaacggcggcaatgaagaaaagacgctgcggaaccggagtttccatttccgggttcccggcatccgccggacgccacaggcaaaggcttcccgccaggcacagagccatggcaacggcatggacgcaggccgccatgcccacccagccgctcatcagttccgcgcgccgggcttccggaaaagcctgaacatccaccgcggcaaccacgcccacggcataagccagaagcacgccgcaaacgccggcgcccaacagccaccatgccgcaggaaaccgcacgggccccttccttccggccatcatcagcgctccggctcccagcaggatccacaattccgcctcatgccacgcggacagggaaaactgcatcagctccggccacgccccggcaaacacgtcccacactgccagcaaggcaagcagggaaaccgcggctttcagccacgtcccggtctccggaccggatttcatccaaagatacaccgccatcagcacggcgggaaccgcggcgcaccacgaccagacggccccggcttccgccagcgcccagggcacgggaaaaccccggagcccccccagaccgcctaccaccggagccgccgccagcacggcggccatccagacggccagtattccaaaaccgcggcctttggccatgttcaagcggaacgccgccgctcccagcgcggcaaacatcagcccgcaggacaggctgccttccagggaggaggcgtccagcaggccgttcatggacaaagcctgcgtataacccagcgccagaagggccgccgccgtgcatcccgcggaggaactgaacagcagccgcacgggccacgggaacggccggaaccacgcagcgcacgccttgccggcggcaaggatggcaaacaccgggcaaacccaccagtcaaagggcatcaggagcaggccgcttccgtctcccgtcataatcgtggccatccccagcacaacgcagaggtgccagagccattccgcgggtttcagccgcctgcatccgttctccgccatgaaagaaaacaggacggggagggcccatccgtacaccagcgcaccgtaaaaggagaacatgaggcgcccagccggccacggcagcggaacacccgccaccagtccggaggcatggaccagggaccacaccagccccagcacgcaggccgccgccagccagaacaggggcagccactcgtccggacggcggcggaacagggaagaaacggcggcgggaacattcatcgtgattcgggaaataccctgcggacgctcaaggcccccaggaaggaaaaacagcagaccaggcccatcgccaccaggagcaggacgagggggagccacgtgccccacgcagccggttccagcccaaagccggggcagaacatccagcacgcttccagcagggagccaagcaggatgcagacgcagaccgcgcccagcgcagacgggcggcgtctcaacgcgggaaagagcaaaacgaggaaaggcaccagaagctggagcgccagagccgcggacaggagcccggaccaggagaaggcggcgtcataaaaagacatttcagccggaagggaggcataccatgtaatcatgtactgggagtacgtgatgtatgctttcaccagcaccatggccgtcagcatgccgcccaggcgcggccacggcaatcccttccctccgtccagcttcctcaggcacgccgcggccagcaccgctaatgccagagacgccagcagggcatacgcaaccatgtacacggggaacatggaaagaacggcccttcccgtccctgccagcatgtcaatccccagcacgcccagcatcatcaccgtcacaatcatgcagaaagcggcgctcccccggcggaaggaaggctgccagacgtttttttccgccgccagcgtctcccatacctgggccatgctccaggccagcactacgatgattcccatgcgcacatacagccacgccggattccaccacgcgggatcagccaggtccagcacgccgaaggcctggacggcgggagaggaaatatccgccacgccccagtagcgggccgcctccggaaagatgacggtagtcaggcagccgaccgttcccgccagcaccagaacgccgggtaaaaagccccagcaggccgccgccagcacccgcctcagcgtgataccccacccggctcccgtcagggaagacaggcagagccagaacaggcaccccaggcaaacgcccgtaccgatgacgcccaccgccattccggcggcggcaaacggttttctccattcatgcagccgggttccggccaccgtcatctcatcccacggcatggcgttaaaagactggcgcatcagcacgcaccacagcagcacggaaatgatccacagggcaagggcggcggaacgtccggcccagccgaatcccggcctgtcccggcgttcccttccggttgatgatgtattgctgttcatggacggtgttccccctgtctagtaacgggtcgctcttcctgcgggggcgccgggagcgcctgaagccggcggacgaacgccaccaggcaccagatttcccgggccgtgagaatgtttccgaaagcgggcatgttcccctgccccagccgaatgctcctgaacatttttccgggagaataggccgcatacttttcatcccggaaggagcctatctgagggtaggtgtcataagcggccatgctgccgcgtccgtttccatccgcaccgtggcagacggcgcaatgcgccagatacagcgtgcgcccctccgccagcacgtcacggctgcgggaaaccccgcccaattccaggggcatgatatcctcctcccccccctgcatgcggccggaggaaaaataggagccctccgcggcaaaggaatcccggtcattcccccgttcacggactgcctcccccgttcccagggattgcgcgacggcatggggcggcgtcaggcggaccttccggcctgcgggagtgaagggctcccgcacctgctgggcgtccgccagcggacgctcgttcatattgtcaaacaaatggggcgcggcattcctgcccccgtcatccctcaccatgaaccagagcgcccccagcagaaccagggcggctatcgccgtcatgccgcctctcatgaacggcccccttcctcatggatgtattcgctcgcgtccggatgcagtgccgcagcaagagcggcggcacgatcttcacggccgccttccagcagaatgaaataaccgtccccgtgttcatccgtcctgaagaaatcacactcgaacgcccagtcgttccaccgggggagaacggcccctttcaggaacccggcggcagtcagaagtccggccccgagcaaggtcccttcaaacagggggggaacgtacgcgggccagttgtcccagccctgcaccctgccctgggtcatgagaggatccgcacagaactgcgtccagtaaagccacagggccacggccaggaatccgcacactccgccagccgcggcccacagccgcacgcctgcgcctacggccctcccggcatgacggttggcaaaccggacggcggcgcagggataaggcgcacagacctcccagaagacgccctcctccttcaccagcgtccggacggcctgaaggagcgcttcttccgaagaaaaggaaagcacccagccggaagtgacgcgcttcttcatgccccgccctccttgttcagggattgctgttcccgcacgtcgcacagggaaaaaaacggagtcacgcgcaccagcaccatgtacagcgccgtgaacagccccacgctcccggccatcatggccaggtccgtcaggctgggggaataatccccgatattggcggccagcagggaggctttcagggaattcacgacgatccagaagcgttccatccacatgccggcaagcacgcccaaggccacgaccgcaatcacccaccggttggtgcgcagggagcggaaccagaacaactggggcagcagcacgttcccggcgaccatggcgcccaggaacacggcattcacgggattcctgcccgggaacaacgccggagagcctccattcagcaccacggccaggtgctcccacagatacatggcccccatcaccagggccagggccagcacgaagcgggagctcaaatccagaatggccggcgtaatggcctgccggacgccgctgccggacatcaggcggcgcacccccagaagaatcaactggaccatcgccatgccactcaaaatggcgccccccacgaaatagggcggaaaaatgctctggtgccaccccggcacctgcgtcacggaaaagtcaaagctcaccacggaatggacggataccaccaggggagtcaggatggccgcaaaaagcaggctggccttttcataggcgcgccactggcgccccgtcccctgccagcccagagccagccatccgtaccgccgcctcaaatgccccgcgcagcaatcccgcagcagcgcgaaatccggcaccagcccgatgtaccagtacaacagggaaagcaggaaatacgtgctgacggccatgacgtcccacatcaggggggaggccatgtccggccagatgccgctcacctccggcaggggggaggccatccacgccatccagacacgccccacgtgcaccacgggaaagacggcggcgcagaccaccgcgcacagggtcatctgttccgccccgcgggcaatcgggcttctccatgactggcgggtcagcagcaggacggccgaaatcagggtgcccgcatgtcccaggcctatccagaagacaaaatgcacgatgtccagcccccacaccacgttattgttcagccccagcactcccacaccctccgcggcaatgcgccaggaactccaccccacaccccacgccgccagcagcacgctggcgagaaacacgctccaccatacggggccgagcggcttccgcacctccgccagcatggtcttcaccggaacggcggaggaagaaagggctggcgctggtctggtcatcatctgcatattgggcggaagctcgttagagcttacttgagtgctttttcccgtcaattcaaaaggggaaggcacgtgacatgacgcgaggttctgtttttccggggacatattcccgggagtaaggggctccggccccttacaaactccggacaggaaatggaaaaaggaaaaatcccctgcgctatgctgcggaagaggtttcacgcacgaaggccggaggccttcgctcccgggagaagctccacaaacattcaaatagctggaattccctgccacagcattttaacatggcccccgcatggacataaacacgctgacttccggagccctgatcagacacccttcccgcggccttcttctcgggaccgggcccttccgggaatcggccgcccccccggattccggccccgccttctatgtcaacacgttccgcctggatgacccgcagccgtggaaaataccgtccgccctgcatcccattccggaaccggaaagccccacgccgcccgctccggaaatcctgtggacggaaccgtccccggacgcgtatgcccaggtattcgcggaaatgattgaacaaatcgcctccggacatctggtgaaaagcgttccggcaacgccccagtttggagagatgcagcctccccacgttccccgtgaactcatcctgcgggccgtcaacggttccccgcttcattacccctatgcctggtggacggagcaggaaggcttctgcggagccaccccggaaaccctgttccaccagcagggacgacgcctgacgaccatggccctggccggaacggcgcggccggaagacgagggcgtcttcatcaatgacgacaaggaaatccgcgaacatgaaatcgtggccggcagcatcctttcccgcctgtccccctacggcagcgtcaccagaacggcccgcagcgtgctgaacctggataccctgatccactttgccacctacctcaccctggaagcggacgaactgctgccgccggaccactggatacggctgctccaccccactccggccctgggatcccagccccggacggagaagacactcgcccagttggacgactggcgttcgcgcctccgctgtccgtcccatttcggcgctccgttcggatttctggaagacggagacttcttctgcctggtgggcatccggtccatgtactggcaggggcggcggctcgcgctctgcaccgggggcggggtggtggcctcctccaccctgacgcatgaatggcgggagctgaaattaaagcgggatacggtcaggcgcagtttcctgcttccctgacattcccgcctgttattcctccgtccagcaggcggaaagcgtctcaaacttgccctctaccgggattctccatacccggccatccctcgccacgccacggcagggaacgccgtccatgtgcgcgctgagggcaatcccggcaggcaggccgtgcagaacaacctccgcggactcatggaacgcgcaggggtccccttcgcacttccacgccagttccagggaatgggaaccggtgccgcggtaaaggaactcatgaacggcgcattccccgttccggtacgcatagccgtcccccgcatcctcatacaggtgggaggccacttcctcatccggcgcccaccagacgtccagtgtcagcgggggccgcggcagttcgcctgcgtgctgctgcaccggccaatggggaatgaccgccccgccgcgcacgtacacgggcaggaaggaaagcgggcatttcacccagacatcctttccggtatcctccatcaggctgtccgtgtggtaggaataccagacgccttccgggatgtagaggaagcggccgccttcctgcggctcatggatgggaatgacgtacagatggtcgccgaagaaatattccgccccccgccagtaggtgtccctgttcctgaagcattgaagggccagggagcgcagcacgggcatccccgtctccgcgtaacggcggaactgcgtgtaaatgtagggaagcaggcggtagcggccctcaatggcggctttcacgtatgcggtggcctcctgtccgaacacccagggctcctggcctccgaattccccggaggaatgattgcggaaaagcccgtggaacgcggccatctgcatccagcggcaaaacagctccggcgtgggatgccccatgaagccccccgcatccgcccccgcgaaggagatgcccgaggcggcaagccgctggcactggaaattggccagcttcaaatgctcccagctggaccggttgtcccccgtccaggtggcggcaaagcgctgcaatccggcaaaaccggaccgggacagcaggaagggacgcctgtccggagcgtggcgcttcatgcccagccaggaggcttccgccatgcactgcccgtaaatgttatgggccttttcatgggaacagggcatgccgtcgtactcatgccgcgtatccatcgggaacgtgcggtccggaaagacgacaggctcgttcatgtcgttccagaggccgcgcacgcccacctcttccagatcatgcctgaacaggtccgcccaccagctgcggacggccggggccgtgaaatccggaaaattgcagagtcccggccagacttcctccgacaaaagattgccctccgaccgccggcagaaataattccgttccaaaccctccgcccaaacaggattggcggggttgatcttcacgccgggattcacgatcaggaccgtcttcacgccgtcctcctccagagagcggaccatccccgccgcatcggggaaattgtgcctgtcccacgtaaacccctccttctgctccatgtaatggtggtccagatggacggcgtcgcacgggatgcccaggtcccggaaccgctccaccaggttatacacggccttgtccggataatagctccatttggactggtggtagcccagcgcccacagcggcggcagttcgggcgtgccggtaaggcgcgtgtaggcggctacgatgtccagagggctgcggtcataaatgaagtaataattcatcaggccgccgaacgacccgaaagccagcaccttttcatccgaggcgccgaagtcgaagtacgagcggcacgtattgtcaaacagcaggccgtacgccttcccttcccgcaggctgaggaaaaacggaacgctcttgtagagaggatccgattcctcgtgaaaatcataatggtccgccccccacatggagaaatacttgcccctcaggttcagggcgcagggcttgtcccccaacccgaaaaaatgctccgtgtcctgaagccttttccgtatccacacgcgggcgtcccccgtccagtccttggactcccggccaaagccgccttcatccgccagcaggggttcgtccgtgacaatatcgtaaaaatccaccttttgctcctccgtacggatgcgaatccgcagcagggacgtttcaatgacatgcacttcggcttcgtcatactcccggacctccgcgccgggggcggaatacccggggctgacggcatagctgggctcatcttccggcaccggtccggtgaaatacgtcacgcggacaattccatcgtccgcaaggcacacgctgagagttattttagaaaccgcattggtgtattcccatttgacgagacgcccccggagagggggcgtttttcgtctttcagggatgttgggagaggtgcacattgaagccaaacagaagagagaatcaaaagcgttcgattcagattaaattaatttcatgacgaacgcaagattgaactaaaccaccatttttcttttcattattaggacaaaattactcatattactctagaccgaacatgaaaaatctggttttattgcgttggtgcacaacacggcatgaggccgcttccttcccgacaccgacaacccacatcaaccaatgagcacaatccgagttcttacattaggatgggaattcccacccctggttaacggggggctgggcattgcctgcctgggcctttccaaggcgctggcaaaaaaagtggatttaagagtgatcgtccccaaggccgatccttccgttctttttgacgggttccagctcactggtctcaacaacgtctcctatcgggaagtggagcaagtggaccggaagtattcctatgacagcttcgccctggtggagcacgcccccattgaactggacccctacaccaccgtggagggggaatccggcgtggtgcagttcaccaaggaaggccgcatcaccttctccaagacgcatgaagcggacctccagctattcaaaaacaaggaggacctctatgccggggacctggccctgaaagtcatccagttctccaaaatcgcggtaaaagtcgccatgcagcaggactttgacatcatccacgcccatgactggatgacttacctggccggcgtggaggtgaaaaaagccacgggcaagcccctggtggtgcacctgcacgcctcccagtttgaccgcgccggagcggacgcccgcggatggatttacgatattgaaaaattcggcatggaacaggcggacgccgtcattccggtcagcaaatacacgggcaccatcgccagcgggcactacgccatagacccccataaaatcttccccatccacaacggggcggaccccgtcaaggttttcaagggaaagaaaaaatttccggaaaagctcgtgctcttcctgggacgcctgacggcccagaaaggtccgggcttcttcctgcaaattgccgccaaggttctggagcagacggacgacgtgcgcttcgtcatggccggtaccggggaaaaactccgccagttgattgaatccggagccttcaagggcgtgggcgacaaattccacttcaccggcttcctgaacaaggacaaggtgaatgacctcctctccatcacggacatctactgcatgccctccgtatcggagcccttcggcctgtcggctctggaagccgcccaattcaacattcccgccgtgatctccaagcagtccggcgtggcggaagtcatgaagggagccctgaaagcggacttctgggacgtcaacaagatggcggaacacatcgtccatctctgcacggatgaggaactgtaccggaaagtggtggaacaaagcacggaggacatcaaggcctccacctgggacgccgccgcagacaaggtcatccgggtttacgaacatgtgctgaaccgctaagaaccgccttttcaccccacacgataactcccagccctttccccgtacatgagcaacatttccctcactttcgtggcacaccagcccaaccggctgattcattacgacttcttcaaaattggagaacacgccttctatgaagatgacgatctgaatgcccgcgtgctcagcacggtggcggaacgctgctacttcccggccactcggctgatgaagcagctcatcgaactcacagggggcaaattccgcttcgggctggccctcagcggcgtcattctggaacaggccctgtaccacaggccggacctgattgccgccttcaaggagctggctgaaaccggctgcgtggactttctggtgatgccgtactacaactccctcgcctccgtctactcaccgcaggaatttgcggagcagattgaagagcaccgggaactccttaaaaaactcttccgccaggaatcagacgtgctgatgaacaccggcatgctgtactccaacgccattgcggcgcaggcggaaacgctcggcttcaagggcatcatggcggacggcaatccggcgatgctcaagggattcaccagcaatgaagtattcctggccccgtgggtctataacaccaccaccatattccgcaaccgggaactctccaatgacctggcgatcatgagaaccgatccggaatggccggaatacccgctttcccccaccaccttcgcggactggctgacgcaccagcagggcagcgtcaccaccctgtccatggactatgagacgcttggcgaacgccagtctgacgctacgggcgtctttgaattctggcgcaccatgatccttgcctgcgtggatgccggcaaccggttcatgaccccgtctgaagtggtgcgtgaaatcaagcccgtctccgtctgcgaatgcacccaggaaatgacctgctccaccttcggaaccatgtcccattggaacggcaacgtcatgcaggacgaagccatccgcaaaatctaccgcctggaaaaaccggtcaaggccgccaatgacaaggacctcacccacgtctggcgcaagctccagagtgcggaccacttccattacatgcagaaggaaaactccttcaccccgtatgcctctgcctttgacgcgtacatctactacatgaacgccctggcggacctgcaaatccgcgtcaaaagggaatcacagaacgctccggtccctgcggcagcctcctgaagctccccttggagcgcagcgaacatttgcagcattcgacctgaaactggaagcgtcagcgaacgctcctccccaccgtacgttctccatccgcacaaatgattcagtttgctgcaaaggcttgcggcgcgggaaagctttagactaaatccttggaatccatatccggatagcggacggcggtccggtttaaagaatgatcccaccagagcggctatcacgacacgcaggaacgtaataaacaagtgttcccgttcggtccttctcttcatttttgttgacctcgccgggaatccatattagaaatatttaacattaaagttaaatataaaatgaataatccctcttccctgcaacctacgctcagagccctggctgaccccacacgccgtgaaattctggaaatactgaaaaacggcgccatgccggccggagaaatcgcggaacatttcagtattaccggagccgctatctcccgccacctgtctgttttaaaagaagccgatctcgtccgcgaccacagggaaggcaaattcatcttttacgatatcaacctgagcgttcttcaagaaatactggtctggataggcaatttcaaggcggcccgcgaaacatcctccggaaaatggagcaaaatcatcggaacccagcccaatcattaaacgccatgcagccaaccccgctctctgctcaatcttccccatcctggtggatcgggccaattttcaacgaacttgtcatagccctgtttcccgtgctgacttactatgcagccgtatcgtcacggctgcccgcccgcgtcgccgtacatttcaatgaatacggcatgcccacccgttttgaggacaagaacggcatggacgcccttctgggattcattggcctgggaatcctcggcttcctcatcgggaagattctccgtctgatcatccttttgcccattcacttcagcaggaatgaaaacaaccggcggattggcgcgaagatggccacgtacgcggaattcttcctggtcgtcctgttttcctatctttgcctgaccattcaaaagacaagcctggcaaatacggtcagcctgggagacacggccaaagtcatcttcataagcctgaacacatttcttctgctcctggccaacgtttgccccaagataactcccaacaaatggttcggaatacgcaccccttacgccttcagtagtaatgaagcatgggtaagtgttcagcgactgggcggcaggtttctattctgcggaagcctgttcaacatccttgtgacgcttctccttcccggctcctttcctgcaatcttcatttttaacatggtctcccttctgctccaggcattggtcatacttctttggaagccccacaggaacaggactgaactttcatcttcgtctgacagcgacgtttgttgatgaccggccctaatcattagtagaagaaagaggacgactggttcgcaatgcctctgcacccccctctctgcccatgtacctcaacggccaaacgaaagacctggcatgatcgggaagctggaaggaggaagatactcctcccttctctgcaccgcagaaaaccaaacagcggaaccatgaggaatcatcactctatttgaagaaaaagggatcaagattttctgcgcgccccaatggactccttgagcagatgcggagtaaaataaagttcatggagagggattcaggcacgtgcagaaagaaacccagtccagaaatttcacagcccattatgcctcacgatgcaacagaccggctaaccccgcgctttatcgcggcagctcaagagtgatttcccctgccgccgagacctttcgccaaacaggcggcccgatcccgatccgggaaaccgtcaatacccagtagccaggcgcttcaatttattgcgcagggtgatcttctgggcggaagaaacgcgctccacaaacaggatgccgttcaaatggtcgcattcatgctgcaggcatcgcgccagcaatccgttgcagtcaatcgtcacttctcttccatctatcaggagcaccgtagctttgacaaaatccggcctcacgacggaagcgcgtatcttgagcacgctcaagcagccttcatggaagggatgcatgggcccgtaaggctccaggacgggattggcaaacatcaggggcataatgtctgaaagctccttgtcctccccgttcacctttagccaggtgacggactcttcctcctccggaatatcaatcaccaccagttgaatgggaatgctcacctgcggagccgccaggccgatgccttctgcggcgtacatggtttccagcatgttttccgccagggctttcaagccgtcgtcaaaatgttctacggggcggcatttttccttcaataccggatttccatactgcgcgatttccaataacatcgggagggaggggagtatatatgtgttaaggcgcttactgtgcgccggatttgttgatttctattctggcaggaacatcccccgcgtcaatacccacagacgtcagcgcgtcccaaatgccgacaatgacgccaaactccgcctttttatctacgtcaagctgcaatttgacgtccggcttctcccttttcagggcttccagggcggcggccagctcattcatctccaccaggttcccgttcagggaaatggaggatttccccgtcacggccaggacggcccgttgctccgtggaaggagccccttccatgaactccgcgcccggcacgtctattttcagcagggactgcggctttttccactgggtgtgaacgatgaaaaagatgagcagaatggtcaatatgtcaatcatggggacgatgggaacccccatggttcttgctttcttgcggtaaaactgcatggcctgttcagcgttgggaatgatggcagcggaaggaaatcagctccgtcagcaggacttccatggaagcggaaatgcgctccagcttgcgggaataataaacgtgggcgattacggcgggagtggcgatggctagcccggcaatcgtggtgttcagcgcctgggcaatcccctgcgcgatcatgccgtggctctcatccatcccgaaaacgctgaaaatctgcaccaggccgctggcagtccccagaataccgaacatgggggcgatcatcacaatcatgtccagcaggggaagccccgcctggagcgtcacgaactcctcgcgggccttcacctggatcatctccttcagggcggcttcatcctccagaggagaattcagggcgtccagcaccaggcgcccctccacggaatccgaatccgcggccatcctttccagttcgctgcgctccaaggccccgcgggtgtactgctccacggcccgggtcagcctggcgggacagatggtgctcctcttcatattgaacatgcggtaaatgatggccgcaatgagaagaacggaacaggccgccagcggatacatgaaaacgccgcctgcctggaagaatgtgatgcagtccttgataaagttcatggtgaagtatcagtgaatgatgttgttgtaggatggtaggttgttaaaaattgaagtcgaagtacatttccagcgaatccccgacgagcgcgttcctcacctccggcggcatcgcgggcagccgggcaagtttaatggcgaggaaggtgaaggacttctggacctcgctggctcccacgcgggaagtctgcctcatggaggaaaccttgccattcttgttaatcaggatgcggatgcgcacggttccggtgacgatcaggtcgcggttcaagtcacactgacggtaccactgctccccgatggcccggtaaacgatcgcctggtacgtccccatgggggtggcttccacatccagtgtcgggcggcggccaaagctgaatttgcccgtctgcttggttttctgctcatgcgtcttgaagccgggctggctctccgcgttaaacatggggtcgtataaaggctgcttctgcgccggcctcgtattgggaggcaggttcaggttgggaagattgaggggaggattgtccgcccctttcgcaatgctcttggccagttcctgaagggcgtcaggcttctccggttcaccgggccggggcaatgtcaccgcatgcggaagctgcatggccctttcctgcgcggggcggcggttctgccgggccagtccttcctcgcttgccttgcccggaacgccctccctgttgggagaatggtctacggaatccggatggcccgcgggaggcatggacggctccaggggctggtagggaacgttggcggccgctccgggagcggcattcttgttgccgtcccgttcatggctcaggtcgccatcctgcctattctggtcaaaaaggacaatctccccattctcgcgctccacgccgtcctgggcaggcatgtccctgctgctgtccgggtcctttcggccgccttccgcacgcgtgttcctgttgctctggaatttgggggcctccggcctagtggcgctttcctgctcctcattagtcttcacgatggcaggcagatgctccttcggcgcctgcctccggccctccgggtgaggctccaccttcttcaccatgcgcgcgctcaccaccacctgccgccgcgccgcttccgccgggcgcggagaagccagccattcctccggaaccaagtagcttcccgccagcaggaacaggtgcgccagcacggacagcaaaaggcacatgctccaggaaacccggaacagtccgtttcgccgccgttgcttgaaactcatggaggtgaagttttcacggttccatgacgaatgcaatgtagaaaggagacatgatgaagaacgattccgcaatttagtattgcacaaaatcacgtgcagggccatagttgctagcgaccagccacacgcctcccaaacggcaaggcacctttcttatacgttatcacacacctcgttaacacccaccccatatggccaatctcaacaaagtcttcttaatgggcaacctgaccgccgatcccgagctgcgctacacccccaaaggcaccgccgtcacggacatccgcctcgccatcaaccgctactatgcgggcgacaacagcgaacgccaggaggaaaccacctttgtggacgtcaccctctggaaccgccaggcggaagtagccggcaactacctcagcaagggccgcggagtctttgtggaaggacgcctgcaactggactcctgggaagacaaggcctccgggcagaagcgcaccaagctgcgcgtgatcggtgaaaacatccagctcttcccccgcggcggtgaaggcgacatgggcggcgctccgcgccagcagccccagggagctccccgctccaacaactacgggcagtcccgtccggcccagaactacaatccgccccccatgcctccctccaaccagccgtccagcgactttggagacatggatgacgaaatcccgttctaaagccaggacaaacaacttcttttcacaggccgcctttcctccgtgtcaggcggtctttttcatggccgggattcccgcggaagcaaaacaccgcccaggggcacgcagacgttccacagccgtcccctgaatcatgaaagccccttggagcagcacggaaaaaaccgtatgccgggagagccttccccattcatttcagcttggcaaaatcagtccgtcccggcatacttgccgcgtatgaaaatagccgttattggaaaaggtgggcgtgaacacgcactggtcaaggcgctcaaggaatctccctccgcaccggaaatgtactgtttcccggggagtgacgccatcaaccgtctggcagcccccattcccgccagggatctgcctacactgatcgactggatggtttccaataaagtggacctctgcgtagccggggaggaaagctatctggtgaaggatgaaggcctggcgaacgcctgtgcccgcgtgggcattccctgctgggggccggtgaaggaaagcgcccagctggaagccagcaaggaatttgccaaggaattcctgctccgccaccacatccccaccgggcaggcccgtgtggccgccaccctggaggaagcccggcaattcatcggcggcgtttaccccaccgtgctcaaatttgacggcctggccgccggcaagggcgtggccgtctgcatgagcaaggaagaagcggacgctttcctgaaagaagtatttacggacaggcgcttcggtgaagggcgcctgctggtggaagaattcctgaccgggccggaagtctccatcttcggagccctggtggacgaccactacctcatcctgtgcccggcgcgggactacaaacgcctcaaagaaggcgacgcgggccccaacacgggcggcatgggcgcggtggcctcccgccagcttgtggagccggacatgctggaacgcattgaaaaggaaatcgtggccccgacggtagccgggctgaaaaaggacggactgccctaccgcggcttcctgtacttcggcctgatgctgaccccgaacggccccaaggtgattgaatacaactgccgcttcggggatccggaatgccaggccgtcatgcccctgctctccggggatctggcctccttctgcctgcacggggccaagggagaattcactccggaagaaatctccttccaaaacggctggagcgtctgctgcgtgctggcctccaagggatatccggaaacctcccgctccggcgacgccatccaggggctggacgacgttgcgaatgcctccgtttaccacgccggcaccaaatggaatgcggacaaaaactgttatgaaaccaacggcggccgcgtgctggccgtcgtggcgcagggggaatccctttccgaagcgcgccagcgtgcccacaacgaaaccaaaaaggtcaaatttgacggcatgcagcgccgtccggacatcggctttgccagcttcgtctgatttttacccttttcccagcccaactaccccatgaaacccgccgtccttctcaccttcctcttcctttcctgttccgcgtgcctgatggcggacaacgccgcactggccgccaaggcgcgcgaacagataggagtaacggtctcctacaacggaggctatcaaaccatcccctaccccaacggggatgtccccaaggaaacgggagtatgtacggacgtggtcatccgagccatgagggctttcggactggacctccagaaagccgtgcatgaagacatgaaggcccacttctccaaatatccgaaactatggggcctgaaaaccacggaccgcagcattgaccaccgcagggttcccaatctccgcgccttctttgcccggaaaggatggtccgttcccattacggaaaccgcggcggactacaagcccggcgacctggttacgtggaacctgtccgacagtgttccccacatcggcatcgtttccgaccggaagacgaaggaaggaacgccgctgattattcacaacgtcggctgcggtgcgcaggaggaagacttcctcttctcccataccatcacgggccattaccgccctgtgctgaagcggtaacccttcaaatcggcttctttcctgaaataccctggtttcaagggaaatttttataaggtccagaggccctcattcccggaacgctttcattagaaaacatagtggaaggacacgctcccacggtttgaaaaacaacggtgcccgcaccgcccaattttccctctcccgcgcaccctctgcctgtaccctccttgaacccaggatttccctgggcccactcccatgatggttgaaaacatccccgtttccgccacatgaatgcccatgaaccttcttgcaaaaagagggggcttccgtcatcatgcattcatggtcacacctgcattctccgattgtgtcaacaagctgggcgtcgatgaaaacgacgtgatccccttcggccgcaacaaggccaagatttccctggacgtactggacaagccggccgcacccggcaaactcattctggtttccgccatcacgcccaccccttccggagaagggaaaaccaccgtctccatcggtctggcgcaggggttgcaggccatcggtaaaaaagcctgcctggcgcttcggcagccctccatgggcccggtattcggccgcaagggcggtgccaccggcggcggtaaaagctccctgacgccgcctgatgaaatcaacatgcacttcacgggagacttccatgccatcacgtccgcccacaacctgatcagcgccatcattgacaacgccatgttcttccacacgctgaacattgacgaacgcaaagtcacgtggaagcgcgtcatggacatgaatgaccgctccctgcgctccatcatcgtgggactcaacaagcagggcttcccgcgtgaaacgggtttcgacatcactccggcttcggaaatcatggcgtgcctttgcctcgctacctcctacaaggacatggaagaccgcatcaaccgcatcgtgatcggtttcacgacggacgacaagcccgtattcgccagggaactcggcatcaccggctccgtcatggccctgctgaaagacgccctgatgcccaacctggtccagaccgtggaaggggtgccctgcttcctgcacggaggcccgttcgccaacatcgcccacggctgcaactccgtgctggccaccaaaatggccctccactttggggactatgccgtcacggaagccgggttcgcctttgacctgggcgcggaaaaattcctggacatcaagtgccgccaatccggactggaccctgccgccatcgtcatcgtagccacggcgcgcgccctgaaaatgcacggaggcaccgccctggcggacctgaaaaacacggacgtggccgcactgaaaaaaggtcttgccaacctggacgcccatctggacgccgccgcccactacaagcgccccgtggtggtagccgtcaacaaattctttgacgactcccaggaggaactggacgccatcgtggcgcactgtgcggaacgcggcattccctgcgccattgcggacatcttctcccagggaggggaaggcggcaaaaacctggcccaaatggtggtgcaagctgcggacaagccctccgctcctttcaagcccctctatgaatccgcccttccggtggaagaaaagctcaacatcatcgcccgcagtatttacggagcggatggagtggaactgacgcccgcggccagaaagaagctggcccagtttgaagccagccgcctcacggacctgcccatctgcatggcaaaaacccagaactcgctttccgacaacggtcgtctccgtggccgccccaccggtttcaccgtcactgtgcgtgactttgaaattgccaacggagccggcttcctggtggccctctgcggtgaaatcatgcgcatgccggccctgcccgtctcaccgaacgccatgcacatctatctggacaacaagggcaacgttcagggcctctaggcaatctcaatacaagatacacaccttcaccgcacaccatgaaaatcgccattctgggagccggagccctcggctgctactacggagccaggcttcaggaatccggccaggacatctccttcatcgtacgttcggaatacggctacctgaaagaacacggcctgcaagtaaaaagcctgcatggagacatctccctgccccggctcaaggtgtaccgggacgcggcggaagtcggcccggtggacctcgtcatagtcgcttggaaaagcacggcaaatgccggtttttccaaggccctccctccgttgatgggaccggatacggttgtagtcacgctccagaacggcatgggaaatgcggaggaaatcgcccgcatcatcccggctgaccgcatctatgtgggtctgtgcttcatctgcgccatgcgcgcggaaccgggccacgtcaaccatctggaaggcggcaacattcaatttgcacccttcgtcccctcaccggaaggctctgaaaaggcccgggaactctccgaattgtttgccaacgccggcatcaagacgcgcgcctttgacgtcgcggagcaaatccagtggtacaagctcgtctggaacatcccgttcaacgggctgtgcctggcgctgggcggcatcagcattgcggaactctatcaaaacccggaaaacgtcgcccgggcgcgccgcatcatggaggaagtagtccgggcggcgaaggcccgcggctacaccctgccggatgacctggtggaattccacctttcccgcacggaaagcatgggctccttcattccgtccagcgccgtggactacaacgaaggacgccctgtcgaatacacggccatctggggagaccctctctccaaggcccggcaggccggaacatccgtgccggaatgggaacttctggataaggacatccgcaagcgcctgaacatggattgaccattctggttctgtcctactaccaaagatgatgcaacggtcttattattccaatgacctacagtctttttgtacccaatctctaaaagaaattttagggcagattgcttttcatacaccatttgacctagatcaaaattcgcgcaactcctttgttcacgaaatcaaatcactccaacacgttcttaaagatattcctgctggctcaatagcctttgaatacaccattccccgcatcggagaacgaatagatgtcgtcatcgcctgtgcaggtattctctatgtccttgaatttaaagtaggagaatcatcttatcccagacatgctattgaccaggttgtagactatgcactagctttaaagtatttccatcaagaaagccatcaaaagaaaattgttcctttggtaatttgtacccatgctccttctaaggaacatcaacttacagtaggtcaagacggagtttatcatcctatcctctgtaatgataacaccttaggacctactttaacaaagctgactagcactctgtgtgatgaggcattccattttgaacaatggttaacttcaccatacatgcctactcccacgattattgaagcagctcaagcactttaccgtggacatgatgttaaagaaatttcacgtagtgatgccggagcttacaatcttagcctcaccacaaaggcactgaatcgcattattgagcagagtaagcagcatcatgaaaaatccatttgctttgtcactggcgtacctggtgctggaaaaacgttagtaggcctcaatattgcaaatgagcggcatcaatatgatgagcaagaacatgcggtctttctttccggtaatggtcctttggttgctgtcttacgagaagctctagcacgagatgaaatcaaacgttttaaaggtaaaataacaaagacagcatctaaaagaaaagttgctgcctttatccaaaacatccaccactttcgtgatgcttatctgcctccttcagaacaagtccctgcggagaaagtagccatttttgacgaagcacaacgtgcttggacaaaagaacaaacagccaaatttatgttaaaacgccatgttcccggctggaacatgtctgaacctgaatttcttatcagtgtaatggatcgccaccaagattggacggttatcatctgcttaatcggaggtggtcaagagatacatactggagaagcagggctgctagcttggtttgatgcactaagagaccattttccagattggaatgtttatgtatcaccccaaatctctgatgtggaatatacacacggaaaaccacttgaacatctctttacgggattacgcctctatcgggaaccaaacctccatctttcagtttcactccgttctttccggaatgaacgagtttctgcgtttgtaaaatcattattggacgaaaatttaccagtagcccaacagctctactctgagctatcgcctaattatcccatcacgattacccgcagcctggaaaaagcccaagaatggatacgagcccaagcccgaggaacggaacgttatggactcatcgctagctctggggccaaacgtttacgccaatttggaatctgggtacagagtaatattcaagcagaaaactggtttttaaatgataaggaggatattcgttcctcctatttcctcgaagacacggccaccgaatttgatattcaagggctagaaattgactgggcaatcgttgcatgggatgcagactaccgcatagaaaaaggacattttaaagcttataattttacaggttctagttggaaaacggtttgtaaaaaagacgcacagctctatcttaaaaatacctaccgcgtcttattgacacgagcacgccagggattcgtgatttttatcccggagggatgtgacgcggatttgactcggcaatcctccttttatgatggtatctattattatctaaagaaaataggaatgaaggagctatgagaattctagagaatctttctctggggtaaagagcctcaccactttttgtaacatcatgctgaaaaccatcgtcattttcatcattgccctgctgggcttcggcatgatccgcctgcctttgcagaaccgtattctggagcaggagaaggcggcggggctgctggatgacccggtggagctctcctcctccgattatctggaacagcagctcgccatggtttccctgggggggctgcgctccctggtagcggccgtgctgagcatggaggccttcgactgcttcctgatttccgactgggccaatctggaacgccgctacaaccaaatcacctctcttgccccccattccgacttttactgggacaacggttcgtggcatttgggcaataacgcctcctccagctatctggacaataagcggctttctcccatggaacgaagggaaggcttccggaagtacatccagaagggacgcagcttcctggaaaaaggcatcagcgccaacccgaacagctggtacctgcaatccctgctgggcaacatgtacagcgatacctaccgccagccggattttgaaaaggctgcggaagcctaccgcaaggcccgggaacagggagcgccgcccctgacggcgcgcaaggagttttatgcgcttgtccgcgttccctccaaatcccgcgaggcgctggagctgggccgggaattgttcaaggatcccaggaaccggacgcccagcctggtgagcaatattttcgtcctggaaaacaggctgaaagttccggaaaaagaccgcgttcccttccgggaattgttcccgacggacgagattgcccgcgacctgatgagcagccacctggccaattccctgaaataccccgtggacggcttgagggaggccttggaggccttgcctcccgcaaaaacggatgactaaaaacaaaagactaaagataaattaaaaggagctcctcctttaaaggggcgctttttcaatgacggccggaatgaactttaatttccggcctttaatctttaaccactccgctgaaggcgcttggcaacgccccggaaaggtgctatgctttttctccacaacaccatgagtagaatagccctgatcagtgacatccatgccaatctgcccgctctggaagcggtgatgaaggatatagaacagcttcaatgcgacgccgtttactgcctgggtgatattgtgggctacaacgccaatccggccgaatgccttgagttcgtccgcggacgccagattcccaccgtgcgcggcaaccatgatgaggaagccattggggaagacaatccggcaggcatgaaccccgtggcgtacaaagccctgatgtggacgcgccagcagctttccgaagaacagaagaagtggcttcgccgcgcccccttccagcgtatcctgcccaatgaaatcgttctggtgcacgccacccaggacaagcccaattcctggtcctacgtcacgaatgtggacacggccacgcacagcatcaacatgttgcgcgacaatcagttcctgtgcttcaacggtcatacgcacgtcccccgcaccttcatccgccatgaagggagcatccaggaatatgaatccggggacatccagcttctcaaaaccaacaagtaccttattaacgtgggttccgtcggccagcccagggacggagacccccgcgccgcctacggcgtgcttgatgtggacagcatggtttattaccagcgccgcgtggaatacgacgtggaggaagcgcaaaggcgcattctggccgccggactcccggagatgctggcgcgccgcctgggagaaggcatttaatgttttgcgaaccgttgacggtaatacgggatgctccattgaaatcctgcggaatctttaattgtttccattccgcattaagaaaaaatggggaaaccgcatgttagcaaaggctcacaaatttgcattgctacttgcctcgcctgccacaaaccagtagagttctgcgcgacgaatgaagacctatatcatcagacgactccttctcatgcccctgacgctcctgggggtcacgttcctcgtcttttgcataacccgctttgtcccgggaggtcccattgagcagatgatgcagcagcagagcatgagcgccctgtccggccagaaagcgggctcccagcgcggagacaataacctgagtgaagcggatatggagcggctggaagaacagtacagcctccaggagcccatcattaccgcctatctgcaatggctgggagtgcttccgaaaaagattttcatctcccgtgaggagttcggagacatcggcggcatggaaccgtccgacaaggaggatgaatattccggcatttccgatacgcacacccggatcaacctgaatgaaaccggggaacaggtcgtcgtagtccgtccggacaaaaattccgggagcgtgaaggatgcctttttttccggcacgccgtcccggaaagccgccacggaaggctggaccgtggacattgaatcccccctggaccgggcggaacgctgggcgcgccgcatgaggcagacggacaatacggcagccgtccaggacaaggcgaagagctacgcgtggcgcgccgtgatgtacaagaccagctttgacggcctgcttcagggcaccatgggcaattcctttaaatataacgagccggtgtgggacatgatcaaggagcgcattcccgtttccctgtacttcggcatcctgagcgctatcatcacgtactccgtctgcattcccctgggggtggtgaaggccatccggcacaagagcctggtggacaacatctcctccgtcctgatcttcctggggtactccgtccccggattcgccctgggcgccgtgctggtggtatatctgggcgcgcggctggaatggttcccgctctgcggcctgacctctccggactttgcggacatgggcttctggggacaggccggggacctgctgcaccatacggtgctcccgctcatctgctacgtggtcagctccttcgccatcaccaccatgatgatgaagaacaacctgatggacaacctctcctccgactacatcaggacggccatggccaagggcgtgagcttcaagggcgccgtcatcaagcacgccttccgcaactccttcatcccgatcgcctccacgctgggcagcctcatcagcctcatcgtggccggctccatgctggtggagaaggtctttgatatccagggcttcggcatgttgagctaccaggccctgatggacaaggactacgccctgatcatgggcacgctgctgcttacctccttcctgatggtgctgggcaacctgctttcagacatcatcgtggccgccgtggacccccgcattaaatttgaataacacacatggttagaaaactggcataccttctggtcattctggcggtcctcaccgccgtgggagagctgtgcggcctgctcctgcccacactgagctggccctttaccgtctcacgggaaatgagcatgctcaacatcgtctgcacggaccagaacaacggcggcatcctgacgccgcagggaaaattcctgtggttcggctgggcctgcgtgctggtcatggccggggtcggcttctggatcatgctgaaaggcccgcgccggtttaaccccacgcccatcaccaggcgccgcatccagcgctttaaaagcatctcccgcggctacatctccctgatcatcctgctggtgctgacgctgctggcctgcatggaccagtgcctggtgggcaagcgggcgctccttgtggtccaggacggttcctggtacttccccgccatcatgcgcaaggtgtaccagggttccacctttggccagaccggggactttgcggatgcggaagctaattaccgcgaactgaaaaagcaggccggacagcccggcaagccttccctggtcatcatgcccctggttccgtacgatcccacgggggattccaccaatcccggttccgaggccctgacggtgaatgaagacggcctggtgtgcgaatccagcggcaaaccgtactccggcctggcctcccggctgcacaaggatgaagaagcgctcccccacgtcagctacaaattccgcaagggaaaaaaggtggaccgcgccaccggctggctggaagaccggacggaggtgtacagcgccacgtatgaaaacaaccggatcgtggcggagcactacagcggccccggcaccaaggaggacttcctgaaacagacggatgaaaacaaaatcagccgcatcttctaccacccggcccctcccctcaagggaggccacctgctgggcaccaacacccagggcgcggacatcctggcgtacctgtacggcgggctccaggtgaacatgaaagccgccatcttctatctccccatcgtgtacttcatcggcatcaccttcggaatgatgatggggtacttcggcggcatgtttgacctcggcatgcagcgcctcattgaaatcttctcccaggttcccttcctgttcatcatcatgatcatttcagacatggtgccgcttcagatgaagggcatgttcctgatcatcagcctgctcatcatgttcgggtggatgtccatgacctaccagctcaggacctccaccatgaaggaaaaggcgcgggactacgtggcggccgcccgtgtgctgggggcctccaccagccgcatcctcttcatccacatcctcccgaacctggtggccattctggtcacgctggttccattcagtgtctccgccctgatcctggccctggcttccctggactacctgggctttggcctgccggatacgtacgccagctgggggcgcctgctcaatgacggcctggcggacctctccgcaagctgggtggtcacctccgccttcgccgccctggtgatcacgctcctgctcgtcaccttcatcggggaagccatccgcgaggccttcgaccccaagaaattcaccacctataaataacaaaagacatccgttcctccacatacccatgctcaagctgtcctccatcctccgcaccctcctttcttccgtgacgctgtccctcctgctggcagccggcaccggctgcaaggattcctcccaatcccagggggtgggctggcagcctaacgtgccattcggcacgcttcctccggggtttgactccttcccggaacggtggaacaagcaggtcaatgaccgcctggcaagggaagaagccgccaagcagaaggaaatcaagaaccttcgtgatcaattcttcaaggaggaagaccccaaaatcagggaaaagctgcaaagcaagctcattgcggatgaagcggccctctccgtcatccaccgcaggcagacggaaggagactacatcaagttcaagactccggcagacatcccccaggaccttaaatgggaagacgggctggacaatccggaaataggcgatccgaacgccaaaaaaggcggcgtgctgcgccagtgggctccggggtcctatccggacacattccgccccaacggcccgaacagcaacagcggcttccgcggccccctgtatgatgaaatcatcatcggcctcgtctccatccatccggtcaccgggaaaatcatccccggcatcgcccataaatgggcggaaaccgcggacaggcgcaccgtttactttgagctggacccggacgcccgctacacggacggggccaaggtaaaggccattgacctgctggtgaacatgtacatccgcacctcggaatacagccgggacgtcttctacaacaacttcttttaccagaatgcgtccaacatcaccatctacgacgacagccgcttctccatcaccctccccttcgccaagcctctgctcccgtactactgcacgctgttcatcccgtccccgccgcacttctactgcgaattcggccccagttacgtggaacgctaccagtggcgcgtgccgcccaccacgggcgcctacgtggtcaagccggacggcatcatccgcggccgccaggtaacgctccagcgcgtgccggactggtgggccagggacaaaaagttcacgaagtacatgtataacgtggaccagatcgtgtacaacttcatcgcggaaccgtccaaggccattgagctcttccgcatcggcgagctggacgtgatgaacatcaccaagccggagctgtggcacgaacgcatggaaattccggaagtccacaacggctacatcaaccgcagcacgttttacaccatttatccccggcctccgtacggcctcttcctgaacacctccaaatcccccttcaataacctggacgtgcgcctgggcttccagtacgccctgaacatccagaacatcattgacatcaccttccgcggagactaccagcggctcaactcctacaactccggcttcggcaaattcaccaactcctacatcaaggcgcgcccctactctccggaacaggcccgcgcctgcttcgccaaagccggatacaccatcccgtgcccggacggaatcctccgcaagccggacggcacccggctcaccgccgccatcaccttccccaactcctccccctccctggcctccacgctgggcaagctgaaggaagacgcccgcaaatgcggcctggaaatccagctggacccgctggactccaccgtagccttccgcaagatcatggaaaagcgcgttcaggcctccttcatggcgtggggcttcaccccgccccatccgatgaacgagcaaggcttccattcccgttacgcctatgacgaacgcggcagcctcatcacctacaccaacaacatctgcgcctacgcagacaaggagatggacaagctgctggacgctgaaacgaacgccgctacggaagacgaactgcaaaaagccacgtggaaggtacagcagaaaattcatgatgaagccctgtgggttccggcctggaccacggaattcgtcaggctgggctactggcgctgggtcaggtggccaaacagcgccaccacgcaattctgccatcccgtcgtatttgacccgatggaaagctacctgtactgggtggacaacgacatcaagaaggagacgatggaagccaagcgtgaaggaaaaacctttgaggaagtggacgccgtgtacgaccagtaccgctacatggactccatcgacagcctggacaacaaggaaggaagcggaaaactgccgtccgtgcctgtcatcccggaaaacggcgcccccctggaaccctctaaaacggagaaataacaagtgagcgaacccctgttggaaatcaagaacctggtcaccggattcgagacggaatccggcctgctgaaagcggtggacggcgtcagcttcaccgtacccaagggaacctgcgtgggcatcgtgggagaatccggctgcggcaagagtgtcacggccatgtccatcgtgcgcctgctgccccagcccatgggaaaaatcctggacgggcaaatactcttcaagggccgtgacctggttcaggcaaaagaaacggacatgcacggcatccgcggccgccacatcggcgtcatcttccaggaacccatgacggcgctcaatcccgtgcacagcatcggcaggcagatcggggaatccctgatgctccaccggggaatgaacgccagggaagcccgggacgccgccatccagctcttgcagcgtgtccgcattcctgccccggaacaacgcgtggacgaattcccgcaccagctctccggaggcatgcgccagcgcgtcgtcatcgccatcgccctggcctgtcatccggaactcatcattgcggatgaacccaccacggcgctggacgtcaccgtacaggcgcaaattctctccctgctcaaggacctccaggcggaaatgggctcctcctccatcctcatcacgcatgacctgggtgtcattgcgcaaagctgtgactccgtcgtagtcatgtacgccggccgcgtggtggaaaaagcaccggtgggggaactctttgccaacccgcgccacgcctacaccaagggactgctggcctccatcccgcagctgagctccgtgcgcaagaccaagctgcccactatccccggccaggtggcctccattgcggacttcgtgcccggctgccgcttctgccagcgccagggcgtgcctgtggaagaactcacggaacgcccgcccctcgtggaagtatccccggaccactttgtggaagcctgcccccgctgcgccaatctttaacctttttccccttctctgccatgccggaaccaatcttgcaagtcaacaacctgaaaatgtacttccccgtccgctccgggatattcctgcggcaggcgggctgggtcaaggcggtggacgacgtctccttcagcatctaccccggagaaaccctggggctggtgggagaatccggctgcggcaaatccaccatcgggaaaagcatcgtacgcctgctgaaacctacgggtggctccatccagttcaacggaaaaaacatcgccacactctcccagcggaaaatgcgccccctgcgcccgcacatccagatggtcttccaggacccggcggaatccctcaaccagcgccaatccatcggccagattgtggcggaacccttcgtcatccaccgcatgggcacacccgccgcgcgccgggaatgggtgcgtggcctgctggaccgcgtaggaatgccggacagcgccattgaccgcttcccctttgaattctccgggggccagcgccagcgcatcggcatcgcgcgcgccctcacgctgaaccccagcctcatcattctggacgaacccgtctccgcgctggacgtatccgtccagtcccaggtgctcaacctgctgctggaactccaggaggaacgcaagctctcctacctcttcattgcccatgacctggcggtggtcaagcacatctccgaccgcgtagcggtcatgtacctcggtaaaatcgtggaaatgtctgacgcggaaaccatttaccggtctcccaagcatgcctataccaaggcgctgctggacgccatcccggaaccggaccccgccagggccaacaagcaccagcccctgcccggtgacgtaccctcccccatcaatccgccgctcggctccgccttcggccaccgcatccagcacccctcctatccggaaacagtgggtgcggacctcacccccgtggaaatagagccgggccactgggtagccccggacccctgctccctggagccggaggactggaacaaggtgcgccagcggtaaaagcgcggaaaaacgtcgcatccgttacctattggaaaaggcgctcccagaagtaaaacctccaatttcaagaaaattccggctgctaagaggtatggcggaaatgctgattaaccatgaatttacggttccggcagcctggggatgacggcctccccgcccttcataactaaaaatccatccagagcgcagccaaggaaattttctccggccggcggacagcataccccaacaaaaagcctctgttccgcttaggaaaaacacccatgaggggaacaactccctcactcccggaagagtcaccgcctttaaaggcgatagcggaaacaccggttcaccgcagctttgcggcttcggtgcctgccatcccgtcaaaaaaacaaacgagcgcgaaacagcccgcgtccccttacacgtaaatccgcggcacgcgggcactgatgctggtcagcacgttgctggggatggtactggcgcggcgcgtcagctcctcccagcttacattagggcccatgatctctaccaggtccccggtctccacctggtccatgtaggtgacgtccaccataatctggtccatcgtcacacggcccagaaccgggcagtactgtccgttgatatacacgcgcgctccctggttggaaagatactggaggtagccgtccgcatagccgatgccgatggtagccaccttcgtgctccccttcgtcatatagcagtggttgtaggaaaccccgtggttgcccggcagcgtgcgtatcagggtaatgcggctgtacagggtcatcgtgggccgcagctccttgttgtacggggacggcatgggggaatacccgtacaggattctgcccagcctcaccatgttggcgcagggaaccttgtaattgaacacggccgcgctgctgcacaggtgccggaacttgtactggtgccccagggaaagttcgttcacggcctccgcaaagccgctgatctgcccgtgcgtgaaggaaatatcgtcggaagccgcggacaggtgggaaaacacgccctccagatccagatggctgaactgcttgagcttttccgtcaggccgtgcaattcactgggaagaaagccgctgcggcccatcccggtatccacgcccagatggacatggacgggcttgttgtaaagggcgcccagggaattgaaatgttccgcctcctccacgctggaaagggcggctcgccagccgttctgcacaatctcctcccgttctccggcaaaacagggaccgagaatgaacgggcatgtcttcaccccagcatccctcacccggccagcctccgccaccgtggcaacgccgaaaaaagcgcagtcttcaccatccagagccttcactaccccttccagtccgtgcccgtaggcctccgccttcacaatggccatcaggccgtggtccggcatcacgcggcggacgacgttcaaattgtgcctcaacgcattggtatcaacctgggcccatgctctgggagggcttgtgcaactcatgcccggagtgtaggaagacggttgatgctgtacaagccggaattgagccaccttcccactttccggaacggaatccggacaaagccgcacatcagtcaggaggaatgaatccgggaatcttgacggaaggaaagtattccctctttttcacctgccttcaaaaaactccttgccaatcccctgcatgaacgatatattcccacccgcactgcaaatgcgcggttagctcagtggtagagcacatgcttcacacgcatggggtcactggttcgaaaccagtaccgcgtaccatcttcataaacgcctcggaatcaagcatttcggggcgtttttctttctcgaaattgctcaactagcaccatactagcaccttgttttttctgattcacacctgtttgaagttgtccaagatgattctgaaaattggcgggagtttccttcatgatcagctccatggtctgatcttgacgtgctccgccatcctccctaaacttcctcttcgtaaaccacaactgcaatggctgaaaagaataacgccaacattggctttgaaaaacaaatatggaacgccgcctgcgaactgtgggggcacatccccgccgcagactatcgtaaagtcatcgtcggcctgattttcctgcgctacatctcctgcgcctttgaacggaaattccaggcgctcctggcggaaggggaaggctttgaaaacgaccgtgacgaatatctagcggaaaacatcttctttgtcccggaaaaagcgcgctggtccgccgtggccgcggcagcgcacacggaagaaatcggcaaggtcattgatgaagccatgcttgccatcgaaaccgaaaacaggagcctgaaaaatgtccttcccaaaaactacgccagcccggatatggacaaacgggtgctgggcaacgtcgtggacatcttcaccaatatggacatgggggatgctgaggtggggaaagacctgctaggcaggacctatgaatactgcatcgctcagttcgccgcctatgaaggcgtgaaaggcggcgaattctatacccccgctagcatcgtcaaaaccatcgtcgccatcttgaaaccctttgacaactgccggatttacgacccgtgctgcggctccggaggcatgttcgtgcagagcgtcaaattccttcaggcgcacagcgggcggaaagacggcatcgctgtttacgggcaggaaagcaatgcggatacctggaaaatggcaaaaatcaacatggccatccgggggattgaagccgacttcggcccccaccaggcggacaccttcttcaaagacctgcatccttcccttaaggcggacttcatcatggccaaccctcccttcaacctctccaactggggacaatcccagctgcggaatgatgtccgctggaaatacggcatcccccccgcgggcaacgccaactacgcctggatccagcacatgatccaccaccttgccccggatgggaaaatcgggctggtgctggccaacggttccctgtccacccagtcttccggcgagggggaaatccgcaaaaacatcattgaggcggatttggtggaaggcatcgtcgccctgccccccaacctcttctacagcgtaaccattcccgtaaccctctggttcatcagcaagaacaagcggcaaaaaggcaaaacgctgttcattgacgcccggaaaatgggaaccatggtcacccgcaagcaccgcgacttttcagaggaagatatccggaaactggccgatgcctttgaatccttccagaaaggagccctggcggaggtcaggggattctgcgccatcgcagatctggaaaccatcaaacgacaggactacgttctcacccccggccgctacgtcggaattgaggaacaggaagacgacggagaaccatttgaagaaaaaatggcccatttgacttccgaactgtccggactgttcaagaaatcccacaaactggaaacagaaattaaggaacgattgaaggctatcgggtatgaaatataaatggacattaaaaaagctctctgatattgccgaattcaatcccaaagagagtataaaaaaagacaggatggctaagaaaatcagtatggaaaagttacagccattttgtcgtgatattccgggatatgagatagcggccttcactggtggtacaaaatttcgcaatggagatactatcatggctcgaattacaccttgccttgaaaacgggaaacgggctcaagtctcaattttggatgatgacgaagtgggctttggatcaacagaatacatcgttttcagagcaaaaaagaatatgaccaatgcagactttctttattatttggtttgcagtccaatggtaagagaacctgctgttaagtcaatggttggttcgtctggccgacaaagagcacaaatcaatgttattgaaaggatcgaagttgcagttcctccattggaagaacaacagaaaataggaagcatccttcgggcattggatgataaaatcgaattaaacaaccgcataaatgataatttagagaagcaagcgcaggctatattcaaatcctggtttatcgactatgagccattcaatggcatggttccatcaacatggaaggaatatcgtttggtagatttcttgcctgtaattacgggtaagaaaaatgccaatgtatcatcggataaaggccaatacccgttcttcagttgctctcaaaacatagcgtggactgataattactcctttgaaggaaatgccatattggttgccgggaatggtgactttaatgtcaaatggtataacggtaaatttgaagcgtatcaaaggacatatgttcttattccgtataatccaaggtataccagttggctctactatgccgtcaaatacaatctcgctgagattacgagtgcggcaagaggttctgtaattaggtttattacgaaagggaatcttgagaatttctcatttttggctccgagagaacttgataaatgtgaaatcatcgacaccttttctacaataaaccacgcaatagagcaacgcgtccaagaaaactatcgcctgcaagcccttagagattatctcctgccccgtttgatgtccggcgagattaatgtttcctccatcaagatctaagctactaaattatcatttagccggatcaatgattgcctatttagcctattctcgtctcaatttgtttaacaacatatcaacatcataacaaccgatatttcaatatcccttcccatcacaaaatgattgattttcaacagagggttgtataattacattcatcatcaaccttgaagcacgcattcagatggcaggagcatacacggaagacagctatgaaaagtctgtagtggaactattccagaacatgggctacacccacgtttacggccccgacgtggagcgcgactatcaccttcccttttatgaagatgaattgaaaagcgccattttccacttaaaccccgctttgccgaaagaggctgtgacggaagcgctcaacaaattaaaaaacattgataatggagagcttgtacagcgaaatgccgtgtttatgaactatctgcaaaatggaatttccgtacaataccgcgacaagggcgaactccgttccgacattgtctacctggcggattacaacaatccggccaataattcctttgtcgtggccaatcaatggacattcatggaaaacagctgcaagaggccggacatgattctgttcctgaacggcttgcctgtcgtgcttgttgagttgaaatctccttcccgggaagagacggacgcttccgaagcctaccggcagctccgcaattacatgaaggaaatcccttccatattcgtttacaatgtcatttgcgtgatgagcgaccaaatgacttccaaggccggaaccattacctccggagaagaccgtttcatggaatggaaaacggtcgacggcagttatgaaaatactaggttcgcccaatttgacaccttcttcgagggactgttccaaaaacaacgcctgctggatattcttaaaaactttatctgtttttccaataacggaaaagaggccattaaaatactggcgggctaccatcagtattttgccgttaaaaaagccattgaatctacccggaacgccactcttaccgacggcaagggcggggtgttctggcatacgcaggggagcggcaaatcactgtccatggttttttacgcccacctcctgcaagaggctctggaaagcccgaccatcgttgtgcttaccgacaggaacgacctggacgaccagttatacgggcaattcgccaaatgcaagggcttcctgaggcaggaacccatccgggcagaaagcagggaacacctgaaaaaacttttacacgggaggaaagccaacgggattttcttcaccaccatgcagaagtttgaggaatcccatgaggctctttccgaacgcagaaacatcatcgtcatggcggatgaggcccaccgggggcaatacggactggcggaaaagatcagaatctccacaaatgaagaaggagagaaaattgccaaaagagttgtcggcacggcgcgcatgatccgcaacagcctgccgaacgccacctatatcggctttacgggaactcccgtctccaccaaagacagaagcacccgtgaagtgttcggggactacattgacgtctacgacatgactcaggcggttgaggacggagccacccgcccggtttactatgaaagccgggtgatcaaactgaatctggatcaggaaaccctgaagcggattgatgacgaatacgagctcatggccgccaacgccgacccggacgtgattgaacgcagcaagcggcagctggggcaaatggaagccattctgggcaatgacaacaccattaattcccttgtccacgacattctggaccactatgagcattaccgggaaggcctgctgacgggcaaggccatgattgtggcttattcccgccccatcgccatgaaaatttaccggcgcatgctggaattgcgcccgggatggaaagaaaaggcaaaggtggtgatgacttccggaaataatgatccggaagaatggagggaaatcatcggcaacaagagctgcaggaatgaattggccagggagttcaaggataatgacagcccgatgaaaattgccattgtggtagatatgtggctgaccgggtttgacgtaccctccctggcgaccatgtatgtctacaagccgatgagcggccataacctcatgcaagccattgcccgcgtcaaccgcgtgttcggcgacaaggaaggggggttggtggtggattatgtgggcatcgcttccgccctgaaacaggcgatgaacgactatacgggccgggataaagccaactacggagataccgacgtggccaaagcggcccatcccaagtttctggaaaaactcagcatctgccgggatttgttccatggatttgactattccggattcacgacgggtactgatcttgaacgggccagatgtatcagcggagcagttaattttatcattggcagggataaggaaaagaaacaggaatgtttcctcaaggaagcgctgatgctgcgccaggccctgtccctgtgcgcttccattgcccaggaagccgaccggttcgaagcagccttctttgagtccgtccgggtcctggtgcaaaggctcagaaacgcgggcgccgggaagaaaatctccctgaaggagatgaacgacagaattaacgcgctgttaaaacaaagcatccggagcgaaggcgtcatcaatctattctccgacgtttccagggagttttcactttttgaccaaacgtttctggaggaaattgcgaggatgaaagaaaagaaccttgctctggaattgcttaaaaagctgattcttgagcaggtctccatttacaagaggaccaacatcgtcaagtcggaaaaatttagcgagaagatgcagcggttgattaattcctacatcaacggcttaattactaatgaagaagtcatcgcggagatgctgaaactcgctaaacagatagcggaagcccacaaggaaggtaaaaataatggcctttcctctgaagaagaggctttttacgatgcgctgaacaggccgcaggccgttaaggatttttataaaaatgacgagctgatcgccatgagcagggaattgacagaggctctgcgcagaaacagcaccatcgactggcaaaagcgcacccaggcgcgggcaaaaatgcgcatcatgatcaaacgccttttgaagaagtacaactacccgcctgatgatgtgccgaaggctcttcaaaccgtcatgagacagtgtgagctgtgggcagacaacattatggatgtcggaaaaaagagttatttgaatgattcttccgaggatgagggagccctcagagtagcggaagatccggaacaatactgggtcaacagttgatcatggcaaggcattcaaccagggatggaaaatggaatccgcatctgcctgttccgaacatcttcggagcagtatatccccgcctttcggatttttttctcttccaggctgcgcccgtatgatttactgcgatccacatcggcaggagtgcctgagcagacaacccccatagattccttgtgcaagacattgtgcatccaatcagctcagaggcagaagtggtgatccggctgtcattgatgataaatcataaacaaagtaattccaagagggacttaacaggacaatcctctcattggctctacttccggaatccctttcaaatattcattcccctgattccagcttaaatgcttttacaggaaggagtcgaaataaacaccatgaaagcatcaaattcggcaacatgatacttctggacgccgccatgtgggcgaatcatcctgacatgacctgaactcacggcctctgccagtaatctgcaaatggtcgatttactggtatcataacgcctggcaagagtcgcctggcttgcccaaacaacggaacccgatttagctgtttcccgggtaagaagaacatccagacattctcgaatgcgccttaactctgtaatgatgtcctcggcagagacaaaagtaccttctatgattttcatattcgagtagaagattagaacttcagagaagattagcctcttcttgcgcatctgaagatatccaggcatttctcaggtattgaatctcgtcctctcttaaaaaattcatgtagctttgagatggctgcttcaaaatcctttgttcggccaattccaaaacatgccgttccaacgttgttgtaggatgatattccaggtaggccgccagcagggaaagcagtctgatgctagatgcctgttcgacattgtaatagaccaatggatcatcgaaaactacttcaacaatgacctcggcatcttctccaggcaaacatggagtcagtccggaaaggcctctaatttcccgattgatgcgcaagactgttaccagctcaccgccttatccaaccatgcttcttaatgcacatttgggatgcacataccattgaatcttctccaaattattcagataggcgcttaccttggccatggaaaattcgtgggtgatcctgaatgcatagtacttctccaccttaagcggaataaaattgtcccgaagcttatttaacagggtaaaacggtttctcctgaaaacagcgccgtaaatgccgtcagcaaggaagtcgtagtttatacggagcaagaccgattgaaggccattccggaagaggtgcaggacgtttaccacagcctcagagaaaaaattctcgatttgggaaacgttggaatcaaggccaacaagctttatgtcgccttcactgtcaacgattcgaatttcacggatatcgctttgcagaaacaaggcctgaaactctggatcaaccttcccaaaggcgaattggaagacccctataaattcgccagggacgtttccaatatcggccatcatggaaatggcgtttacgagctggctatcaaaaatgcggacaagctggattacatccttaccctgatcaaacagtcttataagcaaaaagcttaacccctcctggctgggaagatttaaccgtgccattgcttttttgatgaacgctgcatactcccggcagcatgggcattgacttggttttcctttctccgtatgcttccgccctcatgcctgcgctgctgatcacgtctttcatctgggcgttgtcattcggactgctggggaactgcctgtccgacctccccgccagttttgtcgcgctggcgcgcatggccggctcgctggccgttttcctccccttcgtccggaaggttcctttcagccatgcaatggggatgatggggataggcgccgtccaattcggaggaatgtacctctgctatatcgcagccttccattatctgccttcccaccaggtcgcccttttcacggccactacgccgatttacgtggttctggtcaacggcctgatgaagaagaagctgccgccgctccatctggcggcggccgttcttgcggccataggaggcgcgggcatcctttggaaagggtattccgccggcaatggcgaacttacgggaattgttctggtacagctttccaacctttgtttcgcggcagggcaaatcgcctacatttccttgaaggattcctggttcggcggaagtgaagcttcctgcttcgcctatgcctacgcaggcgccctgctggttaccttgcctgccggactgccgtcagggctggcctgctggcaggagatttcagccatgcaatggtggctgctggcctatttgggagtcatcgcttcaggagtctgctttttcctctggaattacggcgcccgccgggtgacgcccgtcaagctggcaatcatgaacaatctcaagattcccctggcggcgctgatttccctgctcctgttccgggaacagcccaatatgttcctcctggctctcgggtgcctgcttatcctgtcctctttcctgatcgcgcccattcctcccaagaaggctgcgcggaaacaggcttccggcggccggattccggaataacgcacccttgtcatttccgcccgcgccagtttccagattctcctttcatgctccaggaaaggcatgacacatcacatccgtttcattttgaaccggagatggaatgaacaggtcttttctggcagtactttcctcctgttcatgtttaaggtcgcctcccattttttcccattcctgtgctgctgcctgatggcccagttctctccgtcattcgccaaaacggtggaatacgatttatacgtccggaacgctccggtcaattttaccggggtcacgcgcccggccatgaccatcaacggaagcattcccggccccgttctgtattttacggagggggacaccgctgtaatacgggtgcacaacctgatggatacggagacttcctttcactggcacggcctgctggtgcccaatgaccaggacggggtgccgtacctgacttccgcgccggtaaagccccacaccacgcatacctatacttttcccatcatccagaacggcacgtactggtaccattcccacagcggccttcaggagcagagcggcctgtacggcgcgttcgtcgtccgcaagcggcccggcgacccggcgcgcaggccggaggacgccctgccggagtatacgctggtgctgagcgactggacgaacgagaatccccaggaggtgaacaggaagcttcacaccgggtcggactggttttccatccgcaaggggagcgtgcagagctactgggaggccctgcgcgccggctacctgggaaccaagctgaccagcgaatggaagcgcatgaacgccatggacgtgagcgacgtgtattacgaacgctttctgctgaacggctcttcgcaggcttccctgccccggctgaagggcggcgaccgcctcaggctgcgcatcgtcaacggggcttcctccacctatttctggctgaggtacgcgggcggcaaaatccgcgtggtggccagcgacgggaaggatgtcgttcccgtggacgtggaccgcatgatgattgcggtttccgagacttacgacgtcgtcctgacggtaccggaatcaggcagggctttcgagttccaggcgacggcggaggatacctccgggtcttcctccctgtggctgggccatggggaaaggcagccgctgcgccccttccccaggctgaattacttcaagaagatgaagcagatgaacggaatgatgaccatgggcggtaacatgaagatgatgaaaatgaattccggtcccatgcgccagatgcatcaccacggcatgtccggcggaatgccggcctcccattccggagatatggggatgatggacatgaagtccggttcctcccatggtggaggccacggcagcatgcaggaggagggggaggaaaccaccctgacgtatgacatgctgaagtccccttcccgcaccaaccttccttccggcgtgcccgtgaaggaattgcatttcatgctgagcgggaatatgaaccgctacgtgtggagcatgaacgggaagactctttcagagacggaccgtatcatgatcaaggaagggcagaatgtacgcatcatcctgaccaacaataccatgatgaggcatcccatgcacctgcacgggcattttttccggctggtgaacaggcacgggaatttttcaccgctcaagttcacggcggatatccagcccatggccacccaggtgattgagtttaacgcggcggagaagacgcgcggcaactggtttttccactgccatatcctgtaccacatgatgagcggcatggggcggattttcacgtatgaggattctccccccaatccacagcttccacaccccatgcgggcactccagcacgtttacgacatggaccggaagtggtacctgaccgtgaacaatgatttcgcctccaacgggaatatcggagacctggagttcggaggcacccgctggagcgttcagggagagtggcagataggctacaaggatacgcgcggctatgaggcggaaggacggctgggcaggtacatcggggagaagcagtggctttacccctacatcggggtggactggacctgccgcaagggtgaggccagagaacgcaacatgttccgccagaccacccaaaaggaccgggaagtggacggcaccctgggcgtccggtatacgctgcccctgctcctgattggggatgcgcgcattgatacggacggaaaggtgcgcctgcaattggagagggatgatatcccgctcgcctcccgcctgcgcctttccttttccctgaatacggaccgagattattccgtgggcctgcactacatcctgacctcccatctcagcgtttctaccaattacgacaacaacctgcactggggagtggggctgatgctgacctattgaacgccttcccccattttctcctgttccagccgggcattcccctgtagcattccttcaccatgtcagggatgatgaattggcagcagcttttgtcggacgcccgctgggggtccaggcaccagagtacggcgtctccgcagaaaaaccgcagcaattacgaccgggattacgggcgcattctgttttccagcgctttccgccgccttcaggacaagacgcaggttttccccctaggccgcaatgattacgttcgcacccgcctgacccacagcctggaggtggcccacatcggctcctccctcggcatgctggcgggagagtggctggcggagaaaggttcccttcccgctcctatagtgccttccgacgtggccaccatcgtttccactgcctgcctggcccacgacatcggcaatccgcccttcggccattccggggaggacgccattgaaaccgccctgaaacggcacggcctggagatgccgtttgaagggaatgcccaggggttccgcatccttacccgcaccggggatccgatggaaggcaacggcctgaaactgacggctgccgttctgggcgccttcatgaagtatccctgcacgcaatcctattccgcggccgtcaggaaaggcggcatgacggcagccaacaagcttgaatgcaagaagttcggcatcggggaacaggagagggaggcggcttccttcgtggccggccatctggggctgcttccccgttccgcgcctgatgaaaaatatctttgctggtgccgccatcccctggcgtacctgatggaggccgcggacgatatctgctaccgtatcgcggatattgaagacgggcatttttccggcattctggattttgagcctaccagggatttattcagccctttcctgacggaatcccagctttgctacgtccgggaactggaaaagaaggatgaaaaagattcctgcatccattacatgcgcgcgctcgccatcggcaggagcatccagtccgccgtggacagtttcatgaagcatgaagaggagcttctgcaagggagcatggatcaatccctgattgaccgttcggaactggccgggccgctgaacggattgtaccggtacgccattgagaacgtgtaccaggcccgggaggtgattgaagtggaagccatgggctacaaggtgctgggagagctgatcgactttttcatggagtgggtgaaccatccttcctccgggcagtccaaaaaagtagccatcatgcttcagggaaccggtctgcccaaggatgacgaagggaaggacgcacgcctggcgcacatgcttgattatatttccggcatgacggattccttcgcgctggagacgtaccggaaattgaccggcattctgtagttcctgccgcactccgcttttcaaaaggagttcaagacctgcccacagggaggccgcagggatatcccctttcttttccttccatcttcttccggaggttcctccggatgtggaatagatgtcctgctgctgttccgtgttttttcttcccggaacgcgccgctttttcagaagaggaaaaagccccttttctgcatgaaaaaggctgccccacacagggcagccgtccttaacataatgatcatggatttctccattgtttcatgaagaggttaaaagcagaagttggtttctatgtttttcaggcgttccctgacggcttccggcacggcttccttttcctccggcgtgttgtaggggccggagtacaggacttttcccgcggaatccgtcacatggacggtggtgcccgcctgggagctggaagaaaccacaatggttccgttggcgtccgacatccggacggaagacgtgctctgccctccgccggacaccttgcccatggggggcatgggcatctggtgaaggttctggaggctccggagcatctgggccgctcccggcgtcaggttcatccggccgatgatgtcatccatccgcgaatcatcaatcgcggagtccctcaaaaaatcatccatcatttgctgcatgtccagaatgcgctgcggaaggctgggccgtgcggccattccggcgggaggaaccgcctggcgccggacggagggaaccacgcgcggctgggtgcggggatctccctgggccgccagtatttcttccgcggaaagcgttccgccgtccagcgtgacatccgccgtttcccgcttgcccttgcggtagaatacagccgtaatcttgtctcccggaactttttcagacagggcttccgtcacggagcgcgggccggacagggagatgtcccccagcttgatgatgacgtcgttttcctgaagtccggccttggcggcggggctgtccggcatcaccttggtcaccagcacgccgggaaatccgctgagttccaattgagccacgactgcctgcggcaccgtgccgggcacaatgcccagcctggccggtctggaagagggcagcggcttggtctgcggcgtgtagggagtcaagggcggcggctgaaggttgtccgtacttcctgcgggccggtcaatggaatatccggagcccgaacctatcagcaatcccaatgtcagaaagatacaggttttcatatccatgtgagataatatacagcatccgtccgcgcaatgttcaaaatttgtgcattttttttgcaggtcctcgccccgccccttccgtcccgcagtgtcggcagaccgccaaggaacgcatcacgggagtaaagccaagccaacccacacttgggtgagacctttatccggacgcctttccctccaccggcagggagatttccctcccggtagaacatttatttccgggcatgggaaaagagctccgccatgcatccagggcgctttctttttcttcacaaagcagagacgcggaacaaggaacaggaccggagagcgcgaacgcttgcagcaacagaatggaaaatttcaaccgcgctgcccacaggcgttcacgcggcggtcgtttaatattccttttcaggaagaattctacggatgacggcaggggcaatcacgggcacgcgctcgtctccgccctgcaattcaaaaagagtgggtttccgcagcagctcccgcttttccccgggcagtacaggggcttccgtcttttcagctccggcttccgcctcattccctccggccaccgtgccgccgggcgctaccagcgtattttgaaccagcagaacggcgcccaccgcagccgccacggaaatgcctgaaatataggcgagccgccgccacagggggattttcaccgctttttcctgcttcgcctctccggcgcagtccatggcctgcgccattttgcacacggagaattccagcatggaagaggcggaaagccttttcagccgggtttccatttcatgttcggactcggcgcacatcagggaacagcattgttcccggaacagaaccctcaccggggcaggccgcaaacgcttcaaaagggattccatctcatgaatttcctcatcggatatttcatcatgccggagacggtcgttcagggggaagatttcctcacaccttccggccaggcgggaaatcagttcatcggatacgggaaggggctgcatggcggcagtaccgccgccttcctcccctgcggcggatgatgttgtttcatgtttcataagagtggagcggcattagagttggtcttttttgtttctcagcgccttgcggagcaggtcgatgccatagcggtaccggctcgccaccgtgttctgtgagatttccagcgtttccgcaatttgctgaaaggtttgttccccccatattttcaggacaatgacctcggagaatttggaagggagcttcctgagctgcatttccatgaactgcttgagctcctcgtccgccgcggcgctggaaaaccaggggtccgcataaacatcctcgtcctgttcggcggcgcaggcttcatcctcccttttctggcgccggtcggatttgcggccatagtccaccgccagacgccggatggaggcaaagacataggaaagccatgcctcctgccctcccacaaactctccggaggcctccttgcgcgccagccgtatcagggcatcctgaaggatgtcctccgcatcttccggagagcgggactgctggcgggcaaacagcagcagttgagcgacgtgcctccgcagccattcatcccagctcagcaaatggctgtcttcttcattaacttcctcttccctgatgtaggcggacgtattcatttctgcatgttcggttccttcatcaatcatagcgcagcaagttcatttttttgtttaaaataaaagacggaatatagttttccttttcacgggaagagggaatgccttcctgaaaagggcttatttttccttattgattattttctgcatattgttgatccatggctccagctttttggccgccggagattccggatcggcgtcacgggccatgttcaggtattccagggccttgggataattgcgctccagcgcatacccgtcgctgacgtatttggctatttccaggcggatgggcggcaggaggtcccgcttctccagcatttgcagagcttcctcctgtcccgcgcggactttttctgcggaaaaggggcccgcgtgctttttgtagaattgctccatcatgagccgctgcgccgccagggtcacggctttttcagccttcccggcaaatccgtatttgtcctccgggtccagggcggagatttccgcaatcaattccttctgatagggctgcaaatcctccggaagcagcttgatggcctgcaccagtttttccagtttttcctttccctccagcgcgcgggccgcagccacggcttctttcagcttcagcctcgtctccccggcggcttccagtttcttcaaatattcctccaccgttctggagggccccactattttggcatagggagcgccattcccctccatcatcaggacggagggaaacacggagattccgtaacggcgcatcaattcctcatgaaacttgagctgttccggaggcattttcccctccgtcctgggaaaatccagctccaccagcacgaagttgttgtcttccgcatacttggcgaaggcgtccgtatcaaaaatatttttccgcagataaatacaccccgggcaccagtcggagccggtgaagtcaaccagcaccggctgtccgcttttgccggctttctccagagccttgctccaatccgtctcccagacgggagatgcggaacaaaccacggcagaagccagagaaagaacgccaaggacagaaaaaaatgaattcttcatcttaaaggcatcatagcaccatccctgcccttgtcattctttttcagacgttcccgctcctgacagcccggcggctgccgtgacgccgcgccttcggtccccctactgccgtgaccggcggcggatgtcctggctcaggcgcatggcacagaagtccggaccgcacatggagcagaagtgggcctttttggcgttggcatggggaagcgtcaggtcgtggtaggaacgcgccttctgcgggtccagggaaaggttgaactggtcctcccagcggaattcaaacctggcctgcgccagcgcgttgtcccgccactgggcggacgggtgccccttggccaggtccgcggcgtgggccgccagcttgtaggtgaccacgccttccctcacgtcctcccggtccgggaggcccaggtgttccttcctggtcacatagcagagcatggcgcagccgcgctggccgatgatcgctccgccgatggctccggtgatatggtcgtagccgggggcgatgtccgtcaccagtggaccaagcgtgtaaaagggagcttccatgcaccattccagctgcttgctcatgttctcggcaatgaggtgcatgggcacgtggcccggcccctcattcatgacctgtacgcccgctttccacgcgcgcatggtcaggtccccctgcacttccagctccgccagctgggcgaagtcattggcgtccgccacggagccgggccgcaggccgtccccgatggagacggcaatgtcgtaagccgccagaatggaacatatttcatcccagtgggaataaaggaagttttcctgttcgtggatcatgctccactgcgccatgatggacccgccgcgggagacgatgcccgtcatgcgccgggcggtgtggttcacaaaccggaacagcagggcggcgtgcaccgtcacataatccacgccctgcccggcctgttcaaggagggtgtcgcggaagacttcccagctcaggtccgccactttcccgccgaccttttccagcgcctggtagatgggcacggtaccgatgggaacgggggagttcctcaggatccattcccgcgtggcgtggatattcttcccggtggaaaggtccatgacggtgtccgccccccagtggatggcccagcgcagtttttccacctcctcctcaatgccggaccccagggcggagttgccgatgttggcgttgattttcaccaggaagttgcggccgatggccatgggttcgcactcaggatggttgatgttggcgggaatcagggcgcgcccggcggcgatttcatccctgacgaattccggcgtaaaataagcgggcatgcggcagccgttccggcgttccggcgcgtgctggtggtccagccggtcgcgggccaccatgctggaggggccgaagccttcctgcgcctccagctcggacggccgcggcatcatggtgagcgcctccaggacttcccgggcttcgtccgggcggctcttggcgttcggataacggtcatacaccgccttgaacgcttcttccctgcccaggttttcccggatggctacaaattccatttccggcgtaatgacgccctggcgggcgtaatgccgctgagtcacaggcgtgccccccgcagcccggaggcagcggccctggtccgtttccgcctcctccacatcaccgcgggcccggatccacgcggcgcgcagggcgggaagcccctgctccgcggttccctcataagccgcatccccccacggtccggaacaatcgtacacgcgcacggggtcattggagtgggcggtgccatctggcagcagggtatcgctcaggaggatttccctcaagggaacctgcacgtccggatgcagacggcccggaatataaatgcgtcgggagccgggataggtcaaattggcggtgtcgttcatggaatggatgctgttctgtgccggcaggggaacagcggaaacgagaccttcccgagaaacggggcatgcccgttcaatcgaactccctgcggcggaattatccgcatcaggtttgaagggttctgcgggaacagcatgccgttcccgcaatctcagcctttgtttgggcacccctgccgaacttgggaaaaagatagcacgggctcccgtcccatccaagcgttttccggtccgggtgccaaacccacggcgcaggagcgtcgcatgccaatgcggcaacttgctatcatgcgtccgcagggtgcgcgatactcccctctccccccgttatggagctgttccctccgcgccgtggggagccatgctcttcttgctcccccatttcagcagaaagacggaattgacgatcacgacgacggagcctgcattatggaccaatgcgcccgccacgggattcaatattccgcccaccgccagcatgatggcgatgaagttcagggccatggaaaacgtcagattgcacttgatcgttcgcatcatgcgtcttgccaggcgcagcagatgggggagttcccgtatatcgtcgcttaccaggacaatgtccgcggcgtccacggcaatgtcactgcctatgcctcccatcgcaattccggcatgggaggttttcagggccggggcgtcattgattccgtccccgatcatgcacacccggttccgttccttctggaatgcgtcaatccagttgaacttgtcctccggcaggcagtccgcgtaaacccgctcaatgcctagctgcccggctacatgggccgcggcattcccatggtctccggtcagcagcacgggaaccaccccggtttccgccacttcccggatggtggagacggcgtcctcccgcagggtgtccgacagggcgatgaagcctgcggccttacggtccatgccgaggaaaatcacggtgcatccctccctttggtactgttccgccgcccttctgacttcgccgggcacctccagcccgttttcccggaacaattccaggttcccggccatcagttccctcccgtccaggacggcctggacgcctctccccggaatcatgcggaactgttccggctggggaagctcccgcgtttctcccttccggtaacagcggacgaccgccttgcccagagggtgctccgactgcagttccgcgcaggcggcatacctgtaaagcacctgttcggggaggtccggcagaaaactgcgtaccgccgccacgcggggcgtcccgtgggtaagcgttcccgtcttgtcaaaggtgaggtgggatacggaggccaggcgttccagggcatccccctcccgcaccaggaatccatgcctggtggcgtttccgatggccgccatgattgccgtgggggtagccagcacaagcgcgcaggggcagaataccaccaggatggtgacggagcggatcagttcgcccgtgaccagccaggccagccctgcggaagccagggcaatgacgacgatccaggtggcccagcggtccgccacgctcacgattccggcctttcccgcatccgcggattggacgagacggaccatgcgctgaatggaactgtcctccccggccctggacgccttcatgtcaaaggctccgaactggttgaccgttccgctggaaacctcgtccccggcttccttgtccaccggaaggggttcacccgtcattacggcctggttgatggaagtgtggccggaaagaatcactccgtccgccggaaccgtctctccgggcagcacgcggaggacgtcccccgcacatacctgttccgccggaatgacctcctcccggaagccgtccactttccgggcggtagccggggtcagatgaaccagcttttcaattcccgcccgggctttggccacggtcaggttctcaagcagcgcgccgagctgcatgatgaacgcaatttccgccgcggcaaagtcctccccgatgatgacggaagcgaccagcgcgatggaaacgagcacatccgccttgatgtcccaggccgccgccagtccaagcacggcttccagcacgatgggaacgccgcacagcacaatggctatccacgcgacgccaaagggaagcggttcaatatcaagcatgctcaacagcagcgcgaatccggaaacggacagcagcgcgacgtcgcgccttgtccctccccattccagcagtttttccaatcggtccagcatatgattctcctttccatacccatgcaggtacgggttttatatacctataggggtataggtttgtcaagatgagacgaaaaaatccccggaaatggcggttgaaaaaaggctcttgccccctcctgctaaatcatgttggcaaaccgttcgaccgccttggtaaagcgtgcgatggtctgctccgggtctccgtgctccagtccgtcccggacgcaatggctgatatgcccctccagcacgacctggcccaccttgtgcaatgcggacttggcggcattgagctgggcaagcacatcttcacagggaacgtcctcgtcaaccatcctgtcgatcgcctgcacctgtccgatgattttcttgaggcggcgatgcaaattttcagaattcatgcattgtttcattgcggcgtttccttatactgttaggggtatctgtatcatcaagttatcaggcagacaggaaatgctgtcaagaacagagtcctcccgcaggcgcgtaccatccggaagggcctactgtgtccggcctcccttctttcctccttattccaggcgcaacaatcccttcccgcccccgcatgaagaccggaagaacgaagttccggccttcccccgtcaaacgggtccggtttccatggcgggagccgtatacaggcgttcccgggcatgatgaccgcccgtcgccattgtcagcagttcccacccgcatttttcataaaaccccgccaggtccgtcaccagatagagacggggatatccgagcgcggccaaatccttccgcacaaagtccaggatggacgcggccacgcccctgccgcgatgccttttttccacaaatagcgcgcataagttgggggctaaatccttccggtcatggaaatcgttttcaatcactccggcacccgcaatgattgccccctgtccgttcatgaccacgtaccattgcggaatgcccgttttccgttccatgcattccttcatgctttcctcataggcctctacgggaacgtcccacttggagccgaaccagacggaagctgtggaaaggaattcaggatgattccttaaacagaccaatttaccggcgtttctccctttcattttcccttaccctagcaggcccctccggtcattgtcaaaccggagcggcatggagggtggcctccgtatttccatcacgctccgtcttcccaccgggaaaagaacggaatgttccaccccctcagccgtccccggccatcggcaggagcaaaacgttttgtccggcgccttgcgcggaaagagaagaaagacccgttttcatctcgtcagccgcggaaaaatgggatagaccttttttccggggcatgcgcccttccggatgcaacctttcaccggacacggggtttatagaagggaatttcatggacgaagcacaagacatgccgcctgcggaaccagacgaggacgcccagctgatgctgagagtcaggaatggcgacgcttccgccatggaaatgctggtccgcaaacaccagaactccgtgtacgccaccgtagcacgcatgctgaacaacgggccggaggtggaggacatcgcccagcaggttttcatccgcatctggaaaggagccgggaattatgagccctccgcacgcttcaccacctggatgttcaccatcctgcgcaatctggtcttcaatgaagtgcggcgccagaagcgcaagcccaccacctccgcggacgccatggaggaggaaggcggcatgaccgtgttcctggaaccttcccaggccccggatgaagccatggagcacacggaactccagcgggccgtggatgaagcgattgccgccctgccggaaaaggcgcgcctggccgtccagctgcgccgctttgaaaacatgccttacgaggaaatagcccggacgcttgacatgacggttcccgccaccaaaagcctgctgttccgcgccaggaacatgctgaaggacgcgctggcttcttttctggagtgacggccagggaacaggaaaaagggctgatccggagaaagcttttttacaagggcccggaggcccttgctccagcagcgcagccaccagggactcacactcccgcggcctggaagaaacaccgccgccgggaaacggaggcttgattcgtgcctctttcagattcactccccctgcgcgtttcaagcttctctttccgtcctcccggccctcatacctgaactccctcccctgcgctttggagaaattcctacccaaagaccgctgccaaaaaagggccgctcccggaaggaaacggcccgtaaacgattacctgaaagcggcgtcagcgcgcactgcccgcgttgagaacctccttgtacgggattttcaggaagttcagcgctccctgggattcatacagcacgcccacgtggtttttatccacgggcgccaggcaggaataaccccagccgttgcgggcatcgtaaaggagccacttgtcctccggccaggagccggcgtcatccgtggaggccttcagggtcatgtgggaacgcccggaagtggtgttggggttggagaacaggaccaccctgcccgcgcccggcactccgtccacggcaagcaggctgccctggcagacgggttccttcaactggggagtgcggttggtggggtgtttttcccaggttttgcccaggtccttcgtaacgcccaccacgcgggagccgccccagttgcagcgggcattgatcatgatggagccgtctttcaattcaatcacctgggcttccgtcgtctgctggttgacgcccgtgccgcagtgccaggtcttgccctggtccttggaataaacgatggtggaccacggcacgcccttgccgtcccagtactgggcggcaaagaccagcgtgccgtccttcatgcagatgccgttgccggggccgttgaacagaatgcgccagtccttgtccttggtctgttccgtaatgttgatgggcttggaccaggtaaggccgtcgtcatcgctgtacgccagcaccagctgcccgcaggcttccggggaattgtccccggacttgctgccccagatggaatgcttgtggctccagatggcggccacccagatgcggcccgtcttttcatccaccagaatggcggggtcccccacgcccttggtagcccccagggaggggtcaatcttggaatcgtccatggcgatcttgacgtcggaccaggtgcggcccccgtccgtggagcggctcacgcccacgtcaatgttggccggaaggtcgccggaatggttgtaacggatgtcgtaaacggccaggagagtccctttcctggacctgtccaggccgggaatgcggtagaacttggagttgaaatccccgtgcttcactacggccacgccgatgcgctgcgccaccggggcggcattggccaccttcatcagcttgttccccgccacaacgctggccgggcgcaccaccaccctgccgtccagggaggcgcccttcttcatcgtcacgcatgcccacaggtaattgtcgccggggtccagctccagcttccccttcacggaaacctggggcctggaggagccggaaagcttcaccgtacccagtacctgggaggcatccttcggaaacgggtcttccccgtgctgaatgggcggagcctcttctccccgcaccaccgtcacggattcaatgtcggaaagcttcgtcgtgcccgtaaaatccagattgacggccgtcaggaactgaggattaagacagccgtccgtttgaaccttcagggaaagaacgggactgcacgggatgcgcaccatcaccggataggcggaagaagccatctccacctgcggattcaccttcatggggatgcagggcacgatgaacaggtcgtccagcttcaaccccttgttctccggcgacgtcagcttgaacaccagggagcgcgttccggcgggaacgccggcctctatcctggtattgaagccgcccgtcctgatgtccttgccgtcataaatcttcttttcccccttgggccctacggccacaatggaaaattcaaagggggcctgtccggtccagcgctccgcccaggcggacagccgtacttccctggaaggagtatccttcaagtccagcttcagttcggtatcctgcccgccgaacatccgcagggaagatttcccggattttccccctcccccgatttccgccacgccgtcccggcaggacatggggccgtacttggtggaaagcgtggtaaacttgccgtgtttggcctgctcaaagctttccgtacccaaggcagcgggaacagacatgcccagggcacacagcagggcaagccccgttaatgtattcaaaggtaaacgcatcgtatttatggtgtgtttcgcaggacaatacgcagcgaaccggaacaatcttgcccggagctgcgtcattgccagcctgtttcctaacacacgcttttccgccgcgtccagccttgcctgggaggcctgtagaaagaccagtcctcaaccctccgtttttccactggaaggagccgccggctccatggaaatcacgggacgttctggaaaggagctggaatcccggtgcatgtagtaatgggaccagtgaaggacaaccttgtcccccggcttcagggcggctacctttttcaggatgtccgccccctgcaggatgggcttgtgcgccggattaacgtcgatcatcagctgctcctgcttttcatccccgtacttgccgggtttccggtaatccagatacttgataatccggaaggcggcgaaatccttggcgtggtcgcacttgtccggacagagggaggtaaggaacctgcacttgcggtgaataatacccgtaaactccgcctccgccacatggtctgacagcagttctccggacggcagcgtcacgccgcttttttcatccgtcttttccggattggcgacgggggaatcttccgcctgaacgccccaaaaaccggccagcccaagacaaacggcaagaatgcacttcttcatcagcccatccttagccgcctcggaaacaggagtcaagaagaagccgggtctcccgtgaacgctgacaggatatcccaacccaaacataccgctttgttttatttgtcaacatgttggatgatttctggactcttttccgtttccagattgacgcaccgccgtccttgtgagagattgacaaaagcaatatggacaaaaaccgtacctctaccgtgccgatcgttcccaaacagtaccggctgccgttcttcatgctggtctcctgttttgcgctgtgggggctgctgaacaacatgacggacaacctggtcccggcattcagcaagatcttcatgattaacgcttcggaatccgcaggggtgcaaatctccttttacggggcgtatgcggtgcttgccatcttcgcctccatcctgctggaggaattctcctacaaggctggggtgctcatcgggctggggttctacatgatcggcgcgctgtgctacatacccgccgccatcgggcaaagttttgacatttacctggtagccatcttcgtgctggcgggcggcctctccatcctggaaaccacctgcaacccgttcgtcctctccatggggtcccaggagacgagcgtacgccgcctgaacttcgcccaggccttcaacccaatcggctccctgacgggcatcttcctggccaaatacttcatcctggcgcatttgaatgatgcggacatggacacccgcaaggccatggacccggaacaactgaacgccatcgtcagcgacgagctcttctgggtgtgcgttccctatgtgggcctggtcgccatcgccgccgtcatctggttcttcttctgccgctacaagtccgacgatgaaagcgtgcccacccgggaaaacacgcagcccctttcctccaagctcggccgcctgggcctgtgcgtcgccttcatcctcattcccttcctgttccagtactactccacctttgaattcagcatggtgcagcagatcctgatcatgatgatcgggcccatcgccttcctgctcatcatgccggactaccgctgccagctcatgaagctggtgaagctgccgcgctacttctgcggcgtggtggcccagttcttctacgtgggcgtgcagatcgccgtctggacgtggaccatcaagtacatcatgtccgtcttccccggcatgcaggaagcggcggcctccaactactacatcttctccatcgttctgttcatcgcctgccgcgccatcaccacggcgctgatgaaaaaattcaacccggccaacatgatgtccctctttgccatcgcgggcatcctctgctgcctgggcaccatgtacctgcccaaggaaatctccgtctggacgctggtgggcatctccggctgcatgtccctgatgttccccaccatttacggcatcgccctgcgcggcctgggttccgaagtgaaactgggcgccgcgggcctcatcatggccattctggggggcgcggtcatcaccccgtacatgggctccttcattgacaacaccacggtgaaaaaccaggtggcctactttgaatccattgaccgccccctgatcgcgcaggcggaagcagcggactcccgcaaatccgtctccggcgccatgctggccctctacaagatgtcggaagccaatcccgccgggggggaagaacaggccaaagccgccgccaagttccagaaaaacctggataccttcctttccctccataccctggacggggaagcctttgaccaggcggccaaatccctgcccggctgttccggcctcaagccggaagaactggtggtcttcaaggccaacctggaccgcctgcccgcccccgccgggagagaacagcaaattcagcaattctccctgattccggcgctcaccacgctctccgggaaccaggccgaggtacttggcaacctgatttccgaccccctggacatgaagcaattccagacagcccaggaaaactttgtggaaaaagcggtgcggtcatccttctttattcccatcatctgctttgccgtggtactaatctacggcttcttcttccgcaacacccatttgaaaaaggaagaggacgcgcctgcccaggcctgaaccagcttcacatcacctacgcaagatatgaaaacagcattaccaaccatcggtatccgccccacgattgacgggcgccgcctcggcgtccgggaatccctggaagatcaaaccatgaacatggccaaggcggccgcggctctcattgaggccaacatccgccacgcctccggcgaacccgtcaagtgcgtgatcgcagacacctgcattggcggtccggcggaagccgccgcctgcgcggacaaattcaaggccaacaacgtcggcgtctccctggccgtcacgccctgctggtgctacggcagcgagacctttgacatggacccgttcacgcccaaggccatctggggcttcaacggcacggaacgccccggcgccgtgtacctggccgccgccctggccggactgaaccagaagggcttccccgccttctccatttacggaaaagacgtccaggacgccggggatacctccattccggaagacgtggctgaaaaaatcctgcgcttctgccgcgccggcctggccgtagccaccctccgcggcaagggctacctctccatcggcggctgctccatgggcatcgccggctccatcgtggaccagtccttctgggaaaactacctgggcatccgcgtacaggccgtggacatgacggaagtgcgccgccgcatggaccagaagatttacgacgaagcggaattcgacctcgccatgcaatgggcggacgccgtcttcaaattcgccgaagacaagaaccgcccggacctgaagctggacgaagccggacgccgcaggaccttcaaggaaagcgtgctgatggccatgatcttccgggacatgatgcagggcaaccccaagctcaagaaaattgaccgcgaagaggaatccctgggctaccaggccattgccggcggcttccagggccagcgccactggacggacttctacccgaacggagacattgcggaaaccctgctcaactccacctttgactggaacggcccgcgcgcgccgatgcccttcgccacggaaaacgactccctgaacggagcctgcctcctcttcggctacctgctcaccggacaggccaacgtctttgcggacgtgcgcacctactggagcccggaagccgtgaagcgcgtcacgggctacaagctggaaggccatgccaaggacggcatcatccacctcatcaactccggctccgcggccctggacggctgcatggcctgcacggacaaggacggcaagcccgtcatgaaaaagcactgggacgttaccccggacgacgcgaaaaccatgatggaacaagccgtctggtgcccggccaaccgggaatacttccgcggcggcggctactccgtccactacgtcaccaagggcggcgcgcccgtcaccatgatgcgcctgaacatcgtcaagggcctcggccccgtcctcatcgtggcggaaggctggtccgtggacctgcccgccaaggtgcacaagaccctggacgaacgcaccgatccgggctggccgaccacctggttcgccccgcgcctgaccggcaagggagccttcacggacgtctacagcgtcatggccaacatgggcgccaaccacggagccttcacctacggccacatcggcgcagacatcctgacgctcgcttccatgctgcgcatccccgtatacgcccacaacatcccggacgaccaaatctaccgtccctccgcctggggcctccatggcaccgcggacccggaaggcgccgacttccgcgcctgcgccaactacggcccgctgtacggcaaatattaacgactgaccttttcatcaggggaagacattcttcccctgatgacgttcagcgttaatatcaaagactaaatacgaatgattaaagactaaaagatgaacgaaagtgccgctcatgaaaaaagttttgccttttccattcgtatcgtttccttatgccgccatcttcgcaagcaacggtgcgagcaggcactgatccagcaaattctgcgctccggaacaagcataggagccaacctcgcagaagcttcctatgccgtaagcaaaaaagacttcttctccaaagtacacatttcactaaaagaatgttcggagacttggtattggctccgccttctgcatgcaacttcctgcctgacggaccagcaatttgaaagcttgaaacaggattgcctggaattaatgcggctattgaccgctacgacaaaaacgcttgccgggcaaaatctctgaacagtttccctttagtatctaatcttcaatatttagtatttctctatgtactccctctgcttggactgcggcgcgacgaacgtgcgcgcgatggttgtggatgaacaaggcgtcatcgcggggaaggcctcgcagccgaacgccacgctgcccggtaaggaaaacccggaattccacgtctgggacgcggaccggattttcaagcagctctccgaatgcgccgtgaaggcccttgagggcctggatgtggaacaggtgcgggcggtaaccgtcaccaccttcggcgtggacggcgcgctggtggacgcctccggcagccagctttaccccgtcatatcctggaagtgtccccgcacggcggaggtcatgaaaaacatcggcaagtacatctcccaggaagagcttgaccgcatctccggcgtgggcgcctttgccttcaacaccatttacaagctcgtctggattaaggaaaaccgcccggagctgctggaaaaggcccatgcgtggctcttcatctccaacctcctggcgtacaagctcaccggcgtcatggcgacggaccggaccatggccgggacctcccagctcacggacctggaaacgggagacttttccgagcttatcctgaaccgcctaggcctgcgccgcggcctcttcccccccacggtggacgcgggggagaccatcggcgttcttactccggaagcggcggcggccatgggcattcccgccctggagggcgttcctgttatctccgcggggcacgacacccagttcgccatcttcggttccggcgcggacagggaccagccggtcctgtcctccggcacctgggaaatcctgatggcgcgctccgcacaggcccggctgacccgggaggattatgaggacggagccacggcggagttcgacgcggaaccgggccttctgaaccccggcctgcaatggctcggttccggcatcattgaatgggtgaaagccgcctgcttccgcggtgaatcctacgataccatggatgcggaagcggccgccatcccccccggctgcgacggcgtaacgatggttccggacttcctggcttcaggggaccggaaaggctccatcggcggcctggtgctgggccggacgcgcggccacatttaccgcgccgccatggaggcgcttacctggcggctgaaatcccgcctgcgccgcctggaatccgtgggcgggttcaaaagcgaattcctcatcctggtgggcggaggagccagaaacagcgtctggacccagatgcgggcggacatcctccggatccccgtgaaggtctctgaagtatctgaaagtaccgtgctgggcgcatccatgtttgcctttgcgggcgccggggtgtactctacgccagagcaggccagggacgccttcggcatcacttaccggacgtatatgccgggtccccaggaagccgcctacgaaaagctcaaccactaacacgcaactaaatatgtcagaagactggtcaatctcccctcccctcccggacaaggtgttcccgtgggaaaaatacaaccccgtcacgcgggaggaagtgaacgaattcttccattcccctgaaatcctggttatcaaggaacgcatgtgcgacataggccgccgcctgtggaaccgcgaatatgtggacggcaacgggggcaacatctccgtgcgcgtgacgcagaacctgctgctctgctcccccaccctgtgctccaagggcttcatgaccgtggaagacatctgcctggtggacatggacgcgcgccagaaggcgggcatacgcccctccaccagtgaggtgaaaacgcacatcgccatgatgaaatccgtgggcgtcaactcctgcatccacgcccatcccccgcactgcaacgccttcctgttcgccgggcaggttcccccctccggcatcaatccggaagcggatatcttcctgggccacatcccgctggccccctacggcacgcccggctctctggagacggcacaagctgtggcggaagcggccaaacaatccaccgtggtcttcatggaaaaccacggcgtgatcaccggagcccgcgacgtggaagaagcggaatggttcatggaaaacgcggacgcctactgccgcatggtgctgatggccgggctgcacaaggcccccctgaaccaggtaggaccggaaggcgtggcggacttcctcgccatccgcaaatccatcggctacgccgtgccggacaaccagcccctgtacaacacggaaacctacgccgggtacaagctgggcaaatccggcagataacccctctctccaagggggcggcggctgatgcaggccagccgcccccttttttctcaacgcccccctcccttgtgaaaaaatgatcagcctccttcccctatccctcgccgcccttgtttgcagcccggcagccatcccgcaatcttccgggaccattcccgtcagtgtggaatataccggggccggaaaaagcacccctgataaaaaaatgtccttgagcattacatggacgtgcggaaccggcaaagaacatcaaaccgcctgggaaaccacctatgtccacccggacgtgagggcctggcgcctgcctggcctccgcattcacaagatcttcctggaatcgggggaaagccggattgaggaactgtccctcatctggaagaatccttcatccagcggcgttagaacagtctattcttccgtgggaggcggaaacagggaactatcctttgactgggtggaaaaacctttttccaggtagtacgcacccggactgtccgtctttgtccgtttttcttctattgaacgctcatgttcatcgcccatctgcctgcaggctatctcctggcaaaaaccatccgtttacgcacaccgggaaggaaggccgtcatgaccgccgccctgctgggggcgattgccccggacctggacctgttttatttttataccctggacggccgccagcaccaccatcattcctactggacgcactatccttccgtctggttcgcgctgatgctcctcgcatggggagccagccggatcaaaccatggagcacgggcggaacatggctgctgatcttttccatgagcggcttcctgcacctccttctggacttcatcgtgggagacatccctctcctggctccgtggtccatgcgctttcacgcgctggccactgtccaggcgcaataccccccctggtggctgaacttcctgctgcactggtctttttttctggaattgctcatcattgccgtttccgtctgtatcatggtttctggcagaaggaagacggaatctccctcaggaaatccattttctacaggaatccatgatgaatgacgctgggacgcctcttccttttccggaggatgggacaacgccaagctcaaccgcacggtcaactacggggaaggcagctacaggacgcagggcaacaccagcgggtggggctttggagcgatgtatgaactgacctacgacgtgtacctcaatgaagacaggagcagcatcctgcagcccctggccaacgcctcggtagtgacgacgcgcatggacggctacacggaaacgggagcggggaacgcgggcctgaacgtaggcaagcaggaatggacaacgggaacggttgcgctgggcggccggtggatggggctcattggcagcaacatcttcgggcgagaagcgctggctgagttccgggtgaacgcggcccaggacatgggcgaccgccgcggagaaaccaatgtggcgctgctgggcaaccccggcttcatgcagagcgtgcgtgggaccaaggttggaacgatggctctgcaaataggagcggggctgagcgtgccggtaggaacgcagggaacggtcttcatcaacgggaacgcggacttccgtgacggagccaactcggtgaacgggagcgtgggctaccgttatgacttctaaggagagttgaaagttgagagaggagagttgagcggagacgctctgctctccggacttccagggccgttccggcattgtccggaacggccctgctgcgtcacggaacattgcatgctgtgtgtcaaccggattattaatgagcgttggcggaccggttcattaaagacgggaaacatcaatccaatacgggactacaaaagggcgcggcttgcagccgcgtttccgttcagttgccgcgtgggcatgcggcgctccatgacgcttttctccgggaaacccggcattccccttctctacctcctccgggcgggagccgccgcggggggaacaggggcttttccgccggagaacggcgcaaagctccaggaaacattgctcaaaggccccgtgccgcgcacctggaacaatccccccgccagcaggaagacgggagaggtaatcagccccggcaggccgcgaagccccagcttgaaatcagaattaacctgcaagtcggcaaggcgtatccagccgccgccttccagggacatattgctgcccttggccgagaaattgctggtgcggatatagcccttctcaatggaaaaatcgcagtcggccctggtgatcttgtaattgatcaggtggcccaggcccggaatataattggagagggcttcccccaaaaagccgaagagggggatttccaccaggtccccatgcaccagggcggcctcgcccttcgcctggatggagttcatattgcctcccttggatgaaaattcaatggccccgtgcacggtggccttctccatcttcttgccgtaggatctcccgatggaggtcaggttcatgtcctggaggacaaaggagccgttcagggcgtccccgtcgtcaatctgcgccagcacgcggcccgtaaaggagccgtcccagatggtgcccttcatcttgtccaccaccacccactgcggggaaataagaatttcccctttcgcctttccaaggtccagcgtagttcccagcaagggatagcgcacgcgccccgcggaggcgtcaaagcggatgcgccccttcatcagcttcatgtcgtcccccatcgggaacatgcctccgccggaaagcgtcacgggccgggtaaagacaaactccttcaaaaccttggcggcgttgtcggaaaacatgcgcatggtataaccggggtaggcctgcccctccatgcccagaacctccaccgtatcctggacaaagcggaaatctatgctcttggccttgagcgtgcactccgcgggaccgccggacaacccggcggaagacaggtaattcccgttggaaaccaccgtcgtcacgttggtcagcaccaattggtccgtcaccagatgggcatccgcccgcgcggacttcaggtccacgcccttgtaccgcgtattcgtcgcggaaacagtggcctgcaaatcgtaagccttttccagattgtacaggcccagcgtcccctggaaggaaagctccaggccggaatccttgcggaagacgaagcggctcataaaaaagtcgtcatccttcatgcccagcagccggtctatcgtttccagcggaaccgtggactgccccatcacgaacatctggccgtctaggaaaccgttggcgaacagctcaaaaacgcccttctccatcccgatccggcaattctgtacaaaaagctggttggggcggtactccacctccacattcgccgtcttcacgggcaccttgttccaggccaggttttccgcattgatgcgcgcccggaccagcgtgggctccacaggcttgccttccggaatatccagcctgccgtgcacccacagggaggctttttccggcaacttcaaattctcgggaatgggcgccaaattcccggccagggctaccagcaattcaggcttcaaatcagattccagcgtgaagacaagatcggttcccagatagctgccttccagcttcacatggccgtcctcccgcgccaggtccaactgggtgacattgatggagcggccgatcaattcccccctggcggcggcggaggcgaactccaccccctggtaggagacgtccgtcacagccgcctcaatctggaggcggtccacccggaacggccctttccagcccttccccattcccacggtgccgtacactttcaattcagggtctcccttgatttccagcgtaagcggcagcttcacgtcttccggagcaatggaccgggccatgtccagcatcgcatgcatgggcagcgtgctgtgcacgtctatcttgatctctccgtccacgcccatcaccttgccggaaaaaacgccgccggggtgccgtatgtccaaatccgtcacataaaaattgccgtcctcatagctgaaatcgcaggaggccctctggaacttttcccccagcacggagaaagctcccatggagccggagcccatgacgttcagatgctccacgccctcccagttctccgtgaaaaccgcacggcctgacacctgcacgtgcggctcgctcaggaacttcatctcccgcggcaccagggcttcatcaacaatggctacggcccaggacaccaggggggccgtgctgcggacatcccagatcagggaacgtttcttcaaatcggcctggagggaaagattgacgaagccggccgtttccgcatccctcatggtaaagcgcttggccatgatgacggaatccgcgtaatccccgctgaacaggaaatccctgacccggattttcccgtacctcagggaaggagcctgcaaatccatgcccacgcgcactccccctttcgggtcgtcgctcaaattgacggccaggctgggcggagacgcctccggccacttcacccggtccaggtatttcagcacctggttcaactgctccctggcggcggccatgtcttcagccgtcagcgtaaaatctccggaatccccctgcccgatggaaaacgccccctgggcagtcacgcggataccctgcaccacggcatcagccttcacgatgtccaccatgccgggacgccccaggtccagctccgcattcagccctgcggtggaaaaaactctttcaggcttttccgcgtccacgggaagattgacgtccagccctttcacgttcagccgttccggcactacctgcccgtctatcagctccttccagttcagggccacgtccgcctcatgcagcagggccacggggcggcgcgcctccggaggaacaccaggatccagcagctccacattcttcaaggtcaccacggcgcggggccacagggaaatcttcagcgtctctatgtggacgggaatgcctttttccatcagagcctgttccacacgctgcacgacaaaggagggagcgccccagatggagacataacagatgcacccaagcaccaaggcgcccagcaaaataatcaccgtaggaaccaatcccttgatccatctcatgaatgtccgatgagccatacgccttgtcttgtttgcacaggtaccgcgacacgctaccttaaaataagagacattgcaccatcaatttgtgttgccgatttattttacggcaacggacatgctgtcatgcgccttgaacagccccggggtccatccggtcaaaccatctacaggcgggaatccgctttccataccaaccctatcaatcatgaacatcatcattgaccgtgcatcttcccgtgggcatgccaaccacggatggctgaatacataccatacgttcagttttgccaattacttcaatccggaccgcatgcagttcggagccctgcgcgtactcaacgacgacacggttctcccggaagaaggcttcggcacccacccccacaagaacatggaggtaatttccattcccctgaagggacagctccgccacggagacagcctgaacaacagccataccatcacccgcggagaaatccaggtgatgagcgccggaacgggcatccagcacagcgaattcaacggcagttccacggaacccctggaattccttcaaatatgggtcattccggacagggtcaacacgccccccaaataccgggactacgacatcaagcccctgctgaagcacaatgagatttccaccttcctggctccggaaacggatatctccatcatgcagcaggcctggttctcctgggcggaactcgaccggggcgtggaacgggaatatcaattcaagtgccagaacaccggggtgtacgtcttcgtgatagacggagaaatcaagatcggagacacggtgctgcaccgccgggacggagccggaataacggatacggactccatcaccattgaagccatccagaactcaaccgttcttctgatggaagtggccgtctgaccttcccgccaccgtgccatggccgcaaacggcttccggacccgcctgccctgaatggccggcgggttcttgttatttcccggcagcctttcttctgctgcgcagaaaatggcctatcccccaccccagctgcaccagaccgtagcacaggcagcccagcaccacgctggaaacaatccagcccgtcaggaactccaggcttaccatgccgatgctcaacccgtcaaacggggcccaggaccattgctgcactcccgttttcagcatctgccagttcgctccggacgtggggagccccacaagggaaaaaaggaaccaccccagccaccactgggccggaatggcgaaaaaggtgaagccgggaggggaaagccacgccatcaggatggctacgggaatattgcccttgcgccacaggctggcgaaaacgccccacaggctctgcatgggcagcggggcaatcgccgcggcggccccccaggcggcgcctgtcgctacggactgcctgttccaggaccagtagacggggtcaaaaaccctggcggaaaggaatttgctggcccacgattttttacgcacctccgtcagcaggtaaagcctgaccttgcgcatcaattgcctgtagcggtgttccattcgccgcaaagtctcctataaatccgggctgaatcaatcgtaaaatgttccagcgcgcgccatgccgcctttttgcccccaaatgcctttcttcgcgcggtttttcttgattccccatgcagtttcatgaaatacctgcgtacgcaccttccttccgaatcatgagcaagcaacgactcgacgtccttctggtttcccgcaatctcgtagaatcccgggaactggcccagaggcttatcattgccggagaggtgagcgtgggtggccacccttccaccaaaccgggcctcaaggtcagtgaagacgcggaaatagccatccggaaccgcccccgctacgtcagccgcggcggcctgaaaatggagggagccctgaacgccttccccgtctccgcggaaggcaaggtctgcctggacatcggcgcgtccaccggaggctttacggactgcctgctccagcacggcgccgtcaaagtgcacgcgatcgacgtcggcaccaaccaactcgtctggaaactgcggcaggatccccgcgtcgtcgtgaaggagaaattcaacgcccgctacatgactccggaagacatcggggaacaggtggacctgatcgtctccgacgtctccttcatttctctgaaaaaaatcctgcccgcggccttccccctgcttaaggacggaggggacgccctggtgctcatcaaaccccagtttgaactccagccggaagacatcggccccggcggcatcgtccgggacccggtcctgcaccagcgggcggtggactccatacgcgccttcgtcacggaagaactaaaccgctcctggatgggctgcgagccctcccccatcaccggaaccgacgggaaccatgaattcctggcgtggctcaagtagccggaacccttttcctgtgaggcatgccgcgccccaggaacgcagcgcaggcggtcctctcccgctccccgctgacgccgcacgctgccggcggagcggaactttccttccccggcgggtcagagcctatggtacacctcatcgaacgggactctgtaccgctcgccccagatacctttctctctgtcccgtatgccgcaggggactaccatattgatcccggcgccatgaggcaatttcagcagttttttcatccgcttgctgtcaaatccctccagcgggcaggtatcgtatccttcagcggccatggcaatcatgaacgtctgggcggcgagggcgcaggatttgttgaccgtgacgcgcatatcgcactccgagacttcgcgcatcatggggcggaaaaggccgatgcccctggccagcaaagcccggaaagcccccaaaataccgcagcagcgcgcatagaggaacggcatcagctttccatagtataattcccggtccctgatgcgtttggcctggcgttcctccgggctgttccgccggatgtttccacgctcgaattcgaggacgaattgcgcccgctgccggtacaggtcctgccgcgtcacgaaaacgactatttccgaagccgtggcggcagccggctggcctaggcaggccccggcaacgcgggctatcaattcaggccgggtgatttggaagaattcccacaactgcatgttggaactgctgggagccagggaggccaattccaggcagtgtttcaccttttcagggtccagcggtttatttttatcaaatacccgcacggcccggcggtaattcaaggcttcttccaaattcatgccattcaccgccaactgctattgattaaaccgtcccatgaccgtttcagccatcttttccgaactgaacgggtcctggcccgtgatcagatttccgtcggccactacttccggcatcatcggaatcaatgacttcttgtaatccgcccgccgttccttcagcgcggattccagatcgaaaggcacctcctttttctttccggccagaccttcctcaaaccagctgaatcccgtgaccttcttatcttttaccagatattgtccgtccgagagcttcacgtttaacaatccgcatacgccatggcaaatagcaccaactattttattactttcatagtggtttttgatgagttcctgcagaacggcgttatccgtaaaatcgaacatcgcgccgtggcctccggccaaataaatgcagtcgaacatctcaccggaaacttcatccaggcttttcgtgtgccgcagcacatcccggaattccgaatcgtcccagcagcttttggacagtttgtccatgtacatcgttttcagactcatgggatcgacgggggtgtcgcctcccttcggacttgcgatgacgatgtcatatccccgctttttcgctctgtcgtaaatgtgggtgagctcgctgagccacaatcccgtttcctgttttccgtcgggaaacatcccggttccggttacgaccatcagtatcttcatttgtttcatatttctgtttttcctgttctatctataaaaaccggccatcatctgtaattcctgaatgaaatattaattacacactgccggatatatttatttttcatctattggcaccttcaaccatgcacggaaaatgaaactcttgtcaatgcgccactccatcctaataaaaaggtgcagccggttaaacggccaatccgccatcccccttttaaaggaaatccctgacaggaactccgggtttgcctccgggctccggaaccgcatcaggaaacaggaaaacacgtcccacacagcattaaaactcattcatttttaataaacaataaaaatatcactcccatttcatcccgccggaccagccatggaagggaaaaacggaccttctttattacctgccggcctgcgtccaccggagcagccacggctgttccacactcccctcaatgacacaaaatcttccttcacggggccaacggtccggacatacggagctccctccacgccatccccgctggaaaaagaagattccgccttccttcattccatcaaaaacgccgcctttccacggaaccgggaaaagcggcgtgttcgttgttgaacggataattaaagctgggaagcggcgcccttgtccagaaggaacttggcgttcgggtgcttctgcaggtaggaggcagccacatccaccgtcacaggcccctgaacggccttcttcacgatggaagccttcttttcgccccaggccatcagagccacttcccgggcgcccatgatggtggccacgcccatggtgatggcggtggtgggaacgttttcaatgccgccgaaagcgggggcggcgtcggaacgggtcagttcgtccagatgcacctggcgggtgatggtggtatcgtcggagccgggttcgttgaagccgatgtggccggtgcggccaatgccgagaatctggaggtcgatgccgccgcagtccttgattttctgttcgtaggcggcgcagtgggcggcaatctcgtcacccttcaccgtgccggagggcaggttgatgttctccggcttcatgtcgatgtggttgaagagattggtatgcatgaaataccagtaggattccggatggtcgtggtccaggccgctgtattcgtccagattgaaggagatgacgttggcaaaggaaaggccttcttccttgtgcaggcggaccagctccgcataaaagggcagcggagtggcgcccgtggcgaggccaagaaccacgttcctgccttcggcggcgcgcgtgcggatcagttccgcaacttctcctgccaaagccttggcagcatcctggggagtttcaaaagtttctactttcataacgcgccacattttacttcgtttccgggcattttcaaccgaaatagtcccggaatgatgcgcattggttcacttgtgcggaaaaattcagggaacggaagccttcacccttcccgctgcggaaaatgaccgcaggcttctgccacagccggatggatattcggctgaaagacgcgccctttaatcagaaaaggctatttttaatattacttcgctaccatccagttccccttcagttgccgcaaaggtttgcggcgctcctgactgccaaggaaggaaaacccggtttgttttgatttacgagggccgggaggcccttgttcccggggcgcggacatcaagagagacagcggaggttcacggcttaaatggaaaacggccaactggaagcgtagggttgagccgttcatctttcaaattcatccgttccgtgcgttgcatgcttcgctttccgtccagccaccaggcgggttctcccggccttccctcccgaaccatcatccggagcatggcagggagcttatttcttacttcccacaagggcataaacagcacgggaagagaaaaaagcttttctcctttaacagacatccccttccctccggcagccgcggcccttgcgccacccctccgcattacccttgaactttccaccctgatcatgtattgcctttcctgacatggcaggtttgattatttctccaagagcacgcatttttcaggggcacgactgggtttacggcacggaagtgcgcaaggtcttcggcaatccccagccgggggacgtcgtggcgctgaaggatttcaaggaccgcttcctgggatccgccatgttcaacccccattcccagatcgtcgccaggcgtttttcccgccgcaagcaggaactggacggggactttttttccaggcgcatcagccaggcggtggaactgcgccgccagtggctgccggaggaaacgctcacgcgcctcgtctggagcgagtctgacggcctccccggcctgatcgtggaccgttacgcggattacctggtcgtccagacgctgaccatcgccatggagcaccgcctccccattatcctgaacgttctggaagacctgctttcccccaggggaatcatcgtcaggaacgattcccccatgctggcggcggagggcattgagccttccgtccgggtggcgcgcgggcaggagccggaacccttcgccgcaagcagcggcagcgtgcaattcatgattgacctccagacggggcagaaaacagggctgtacctggaccagctggacaattacgccgccgtggcccgttttgcccgcggacgccgcgtgctggactgcttctgcaaccagggcggctttgcgctggcctgcgcccttgccggagccgcggaggtaacagctgtggacgtatcccaggacgccatggacgccgtggcgcgcaacgcaaagctgaacggcgtctccatccagtgcgttacggacaacgcgtttgacttcctgaagaaggaggcggccctcgtccgggacggaggggagcacaagtgggacctgattatcctggacccgccctccttcaccagaaacaagaagtccgtgcatgacgccatgcgcgggtataaggaaatccacctccgcgccatgaagcttctggccccgggaggcattctttccaccttctgctgttcccaccacgccggggcggacctgttccgggaaagcgttctcgacgccgccatcgatgcgcccgccaccctgcgcctgatacagcaacacggccaaagaccggatcatccaattttactgaacattccggaaacggaataccttaagggcttcacttatgaactgcttcccggcagatgattttgttattataacaatatccttctttccggcctgatattgtaaagaatacgatgttgttttccctgaataaaaacaatcgtttcaatgaaaaaatacttgcttatccctttttcctgtcctatattgcgtttcgagcaggtgagcgctcgttaaaaaagctctctggatcttaacggatccagtttcatagggtagttggggcgccccggtcgttttacgaccggggcgactttctttttcagggaatgtctggaattgcatcttttcaatcaggcggttttatagtagggtaatggaaataacccacatttcccttcatgcatcctgccgtagaacaaatccgccagtacctgcaattgatcgctctgcaattcgtgcaacatccggaacaggcggaattgcgcgttgcggaatctccgcagggagacgccgtccgcttccgcctgattctggaaaagacggacgtggcccgcatcatcggccgcaacggaatgacggcctccgccatccgctccctggcgaaggcggccggggaaaagcacggcatcaaggtcatcgtgcacatgctttcccatgaggaggcggccgaacagccgtaagcgctcccgcgccctataattccacatccagcaccagggccagcagattgaactggtccggcgtctccacacggagggcgaagcaggactgttcatccatgccgtagttgtggatcatccgcacgtagccggaataaggctccgccacgccgtacctgccgggctggaaatccctccacgcatccggatggcccgttccgtaacggaatttcagggtgctttcatgaaggagcgcccgcgcgccaagctgctttttaaacctgcccagcgtctcaagcgtctccaggggcatcgtcctcacctccgccggagcggccagccctacggtcacggtttctccgtccagcctgccgggacaggcggcattcccctccccgtccacgctgacgggcaggcaggctccctccccgtccagcaggagggcgccgcaccccgccagatggcccaggccggccatcttctctccctgcaccacggcctccgtgcaggcatccaggcagacgttgccgtccgccaggcgttccaccgtgatgcaggcccgctccccttccccgcgcgccacggcaaaccacacctcttcatccggcgtgccatgggagccgcgcagggacgccacggacaggatgcgtccatgctccaggcggtgggcgtgccacgccgccacgttctgctccctgttcagcgtcatgcacacggcgctgccgtcccccagcacgcaccagacgtggaacgccgtgctcctctgcaccgtccagtccacaatccccgccgccagcaggtggtcggacagcaggctgacgtcccgcgtctggtagccgtccgcctccagggaatagaacaattcccggaccttcatccctccctgctgcacgaacagaaggctgttttccaccgtcagggcgtccagagaggcggaccccaccccggaatggcgctcaaacccggcattggacgcattcagcccttccgagttggaggcggacaagcgccactctccctcactggtgccgatcatcagcccccggagtgaggcaatccaggagatgcggttctgctgggaggccgccatcgtcagaatcatgggagaatccgacggaatgccgggagtgaacgcggaaaaatcatccaccctgctggcccacagcgtctgcggctgccccggcgtacccccgaaccacagccgcccctggtggaactccaccgtgcacggatagccgttccggacgccgaacgcgccgaatgaccagtcattggtctcgcagtcgcccagcacgtaataggacaggtgaagggcgttcgcgaggtagacgctgcggggggaaacatattcctccactaccatttcatggttgaaggagccggtggcggcccggaacacgggcgttcccgtggaaacgccgttcctgtacgccatcaggcggattttgtagtaggacatttcctcttcattgccgctcagggtaaagttgttccggaacccgtcccgctgctggaagctcttcacggaatgccacaccagctccggctggttgggaaggtagttggagccgtccggatacccccggcagatttcccactccgcatcccaggtgcccgtcgtttccagcgtccacgcgccgctgacatggacgcgggcgctggcatcggaacctttttcaaaaaaggccgtgtaccgctccgggcggttcactccgggctggtagtcgtttttccggctgaaatcacggatgcaggtataggcctgccgccagccgtcctcccggtccatggaaaaagtctcccccttgtagaggtcccggtccagggtcgtcagatggtaaaagggcatctgcgttccctccacaacagcctctccgtacttcctggtgacgcgcagaaattcccttccctccatttccggcgtgaacacatcctcgtccgccgtggccagcaacctgttggcgctgccgtcccgcaccatgcggcattccagcctcacggcattgaacagggagctttcatagggcatgccggaaaactccagcgcctccagcctccagtcatcgtccgcatggcgggccagcgtcatgggcggcgtggacggctccacgcagtaaatcacatcattcagctgctgcatccggaggttccccacctgctcgtccgtcttccacggggtaggcgtttccagcacgccgccctccgcatccggcaggggcgcgccgtccttgaaataccggatgtagccgcgccccacttccagcatgaactgcacccccgtggagtacttgaaggaaaccagcctcacgcccccctccgtgcacccagcgcgggcaaccaggcgcgttcccggcctgcgccggagtccgccgaatgggctgaccaggaaattcctcagccgggaggcgccgcgggacacagggtccaggtcggcgcgcccggccagccacggggtcagttccccggcggtgaaactgagccgctgtaatacttgttttgccatattcctccccaccaaagcagggaggaggaaaagccgtcaacacgcctgaaaggtgatgtgaagaatcgcctcttccggcgcctgcctgtttcaatctcctttgcgcaccatatacggaacagactaaccatttattggtataaaattttcataaccctatatttcaaaaacccatattgacggataatatgtttttatataaaattcaattattcttttataaaatgccgctaactcccccttcatttctttcccgtttgtcgatcctcattctgatgattctattcagttccgtttttctgtgggctgatgaagaagagaaagacactctggaagaaacggaagaagaagccaccggccccctgcaaattaaacagcaaacagcactttgttctgcagattattacatcaaaggcggaacaggagataaggaagaggatcggaaaaggaaaaacatcgggatcggtgaaaaaatcactttcttgcttgtcggcaaaccgaaaggcgccatcaaagaacttaaatggaatatagaagggaatgggttcaaacaagttaataccgaacaacttcagggagaattaaaaattgctctgactgcgaaggatgacctggagaaggacgcgaccgcaaaaatcaaagcagaaacaagtgaaggtcaaaaagctgaaattactatcaatatcagaatccctaaaaagctaaagaaagaaaaatttgagggtataatagacatgggagacggaaaccccatatctactgatatgtttcaattctccaaaggggaacatggccttttaggctttattcaattaacgctttctcctactaacgtcagtttcaaaaagatcaaaatcattgaacgggatgggggcctcatgtgggaagggaaaaaattccaagcctccaaaaactaaaccagaactggcgaatgaacataaaacttgtaatctttccggttccgttggaaacaaaaatcatttttatgacatggtaggcgataatcgtcttatcgaagaaattatagaaacaattaagaattcgaaatataatcctcaaaaattttggtttgtatgcaaattatatgtacatagaggacatggaggagagggaagcgaagcagaagataccattctgttgagcacaactaatcaaaaatatcatatagaagccattgatgaatctacgacaaatacgattgtcgaaaaattcaatattaaatttgaaagaaacagcaatgatggctaaaaccttgatgaaaatactgccacgcttattcctttgttttgtcttgccaataatcggctggaattccgccttggctgctcctgagttggaaagcccggactgcattgagcagtacaaacacccttcccccggcatcggagagcttgccgccatgctgaaagacaaacggttcaaatccttttacaagaagatggaacaagatgccctcacttttaaagtgacaacgcaggataacatccatgctgagttaaaggaaaaagtctggcattgctacctcgccgccctggctccagtttttacctttaagacctaccgggaaacggaaccggatgtcgatatggacgatgcggaggacctgaaccgtaaatccatggtatgcggccatctggaaaaatatataaccctggtccgaaattccgggaaaatgaaaccacccctgaaaaaaacggtcattcggaaacttctgctcccctattacgcctgtattctgaaacagtttaaaaatgccggagagaagaatccctacaggattgcagcctataaagatcttaaagatatgcctgcccaaacagaggaaaaccggaaacgctctgaagaacaggtgagaaaactcaaacaactcagcatgagagagcttaagattcttatcaatgatgtagcgtggggagagtctttcattgaagcaagaaacgtcatggtggaagacgaagtcaagcatctggaaaaagtgttcatggaattgctcgtctccgaatttcccggtcaatattccaaggtagaagaattcctgcttcaatccggatacaccagggaagacattcccaacctgattgaccacaccgttggccgtgaacctgaaaccgactttctctaccagggcaggcaccgggttgaacatgaccgacttcttaaaaagaagggaaagaaataaaaacacctgttcccctttgaagaataacctttcaaaagcacctgccataaaaacggcaggtgctttttcaagtcattactttcgtaaagtgcggggaaacattgaatatccagtccttccctacaaggcaatggcccagagcaccttcaggtagcggccttccgggtacgtgctcaggaaggggtggtcccagccggggccggtcatcgccatgatctggagcttgcgcccctgccgctgggcggccttgatgacggtgtgctcaaactccgcaggggaaagcagcccggaacaggaacaggtgacgaacaggccgccgggccgcacgcattgcagccccagcatgttgaggtcatggtacttcttgatgccttcctcatacccctccctgccgatgatgaatttgggcgggtccagcagcacggcgtcaaacagccgcccgttgcgcaccatctggcgcgcgtagacaaaggcgtccgcatgcacgaagtcgatgcgctgctggttgatattgccgttcctcttcgccatggcgatggccttttcatccaggtccacgcccgtgacttccgccgctcctcccagcattttggcggcaatggaaaagccgccgctgtagcagcacaggtccagcaccgcggcccccttcaccagggaggcgaatttaaggcggttgtcccgctggtcgcagaagaagcccgtcttgtgcccctgggcgaagtccacttcataagtgatgccgttttccacaatcttcaccagccggaccggagcgggggattccggggcgtcctccgcgcggatgccctccatgcgggcaatgccttcgtccacctgcaccacgtggcgcttcgtgccgcacaggcggtgcagcaggggcagccagcggtccagcctctgccagacggccagcgtgctcacctccaggctcagcacgtccgcgtaacggtccaccaccaggccgcccaggccgtcggagtcaccgtgcagcacgcggtaagcgttggtggtttcatccaggcacagaatctcccggcgcagcttcacggcgcgttccagggcggcgtccaggtcccgctcggtaaaggcgtccttcccgtggtacaccacgcgcaggggcgtgcggctggcctcgttccagaagcccgcgccgaacagttccccgttcttgtcatagacgtgcaccaggcttcccggggctatttccccgctcacggagccgagcatgcgggggaaaacggcgggattgtacgtgaagtatttcagctccacccacggcgtgagccattgttcactgccctccggggacttgttgacaaaaaggttctttttgggagccgtgcgcgggcgccccggctgggagcggcggtcccggtaggcgggcctggggcgggaatcgctagaatcacgggaattgcggaaatcgttcatgaaatgcgggagaggaaggttgaatctgaggcatagcgggccacggccaggtcgatggcctcttcatacgtcctcacgggccgcttcatcagagaagcgagccgttcgcaggacatggcggtatgccggggccgagcatccctgaaaccggcctgttcgtcgagcttttgttccgccacgggcggcaaagaaggcagcagcccgtgcttcacggcgcatttcagagcggtcacggcataaccgtgccaggagacgggttccccggactggcacaggtgcagcacgccggacgcgtcgctttcataggccaggaaacggagccacccgcacaaatcctccacccacgcgggcatggaccatttgtccgccacggcggagaggggttctccgttcagcgccttccgcagcaccatctccgggaaggagggccgttccggattgccgaacacccaggaaacgcgggcaaccagcgcctccggcatttcctcccgcacgcggagttccgcctccagcttggattctccgtacacgttcacggggcggcacttgtccgactccgttttcaggccggccctcctgccgtccagcacgtagtccgtgctcaggtggatgaagcgcatgccctccaggcggcagatgcgagccatcatctccggggccatggcgttcacgcggtgcgccgtctccggatcatccaggcaggcctccaggccgctcacggcggcgcagttcaccacgtgggtggcgccggaggaaagcagcacgtttttcagggcttttaaatcctttaaatcacaggcgtcccgtccgcatcccaccacttccatgccttcctcttccagatgcgccgccaggcggctccccacacggccgcccgctccgaacaccaatgttctgtacatgacacggagcttagccattccccctccaaaatccaatgaaaaccttttttcatcgtgacaaaagattgaaaggctgtttgaattaaagttgtgttttaccatgaatattctttaacggcctgcggtccgctgaacgccagagccgcggaagtatgcaggaaaggagccctcattaaaacggatgaaggcgggtacggctgcatccagccgtggccggagctgggggacgccacgttgcaggaggaactggacgcgctcaggaagggaaacccgctgccgctgggcatccgcgccttggaatgcgcccggacggacggggaggcgcgcgcgaagggcgccagcctgtttgacggcctgcacattcccgccagccacgccacgctgccctcctgcgtcagccccgccaccatccgcatcatggaatccaaggggttcaaggccggaaaaatcaaggcaagccccaacctggccgccgccctggaacggctgaccatgctcgcctccatggtccccgcctggcgctggcggctggacttcaacgggtgcctgaatgaaaacgacgccctgaaattctggaaatccctgccccaccacctgaaaacccggatagacttcattgaagacccgtgccccttctccgtccagagctgggaacggctggtggacgccggcatgccgctggccctggacatgggctcggactcggagcaccagccggccatctcctcggacctgcccatcatccgcatcgtcaagcccgcgagggaagccacgccggagtatctttacgagccccccgtgttcaccaccgtcatggaccatcccgtggggcagctctgggccgtctaccaggcggcggactactaccgcaacgccctgcccacggaaatccccctctgtggcctctgcacgcacctcctgtttgaaccggaccccttccttgaccagatgggcggcatgaacccgcaggtagccgttcccgccggaacgggcctgggctttgacgggatgctggaagccctgccctggaaaaaactctgacaggacgccgcgctctctcggaaccccgtccggccataaaaaaggcatgaagcggaacgcgcctcatgccttcgtcatttgcctgggaacaaccggaaaagccctttacttcggttccgcggcgaacttgaggccgggatactccttcacgttgcagccgggcgtcttggggttcacctgcaccggaacgaacgtgaacatccaccggcgcgcggaattgttgctggggctcttcaccagcacgcggttccagcccttcttcaggggaaccatggaaggctcccggaaatggtagttttcatccaccagcacgccgccgttgcgcggcttcttccattgcggggggtcaatctcctgcccgttcacgaagaacctgggattcgcgtggaaccacttgccggggacgctcgccgggccgttgcgccagtcggacgtggcccaggtatgaccgctgatccagaagggcaccgtctgcgccttcggggaataaatccaggtctgcgcgtaataggtgtggttcttgtggggataggcccccatcttcgccccgttgaacagcgtcgggaaatcgcagtaatgcttgaagatgatggtggctccggtgtaggcgtccttggaccactcgtaggtaacgccgtcaatctcgtaggaatccttcatcttcccggtcttgttgtccgcctccggggcgaactccgtttccgtcttccctccgttgggaatggggcccagcagcttccacggaatattggcctgccgcacgtaattgaactccttgttcacgaagaagcggtcccggatggcgagcacgcggttttcatactccgcaaatcctttcagcaacgggtccccctgcacgggcaggttggagaaatacttcatgtactcgtcctggttggggtctccctgcaccttttcatggggattgttccacaagggctcggaaacgaacgccatccctgcgtaaacgggcgtctggagaacctggttgcgcgggtccgtaatttccaggtccgggaaagagcacagcatcatgcccaggccgtccgcattctggaacgggcaggcccggcggaagtacatggtcatggccgtttcaaacggatcgaggtggttcaggtaggtctccagggaatccacgtacttggacccgttgacaggccatgcgccgcggttctggcggccggaccacaattgcaggatggagccgttatagcccttaggcgtcagaccggggtgccacctcatgggcgtgcggccgcaggattccaccgcattgatgtattccttcagaatgtcattgttcacctgctcgtccttgccgtgggcctcgtccgtgccgatgtggatgatgggcatcttctccttgggaaccagggcgcacatctccttgatcagggccaccagggccttcgtggccttttcatcgctcatcttcacgttgagcgccttccggaacgcctggctgtgccccggcatgtccatctccggaatcagcaggatgttgcgcaggcggcagtactccaccaattgcttgaactccttctgcgtatagaatttgcccggcatgcgggtgaaattcttgggatcattcagttccggataaatcttggactccagccgccagccgggatgctccgtgaaatggaagtggtacacgttcagcttaagctgcgccatggaatccagctcctgcgcgatcagggggagcggcatgtaattgcggcccacgtcgttcatgaacccgcggatttcaaaatccggccagtccacgatatcgcaggcggcgatggtcgtcgtcccgccgcggcgcagaagaagctgctccagcgtcttcatgccgtaataaaaccccctggtgtccgccgccgtaatcagcgcgccgccgggagtcacgcggagtgaataggcctcctccttcagcttgggattctccgtgccggccttcacctcccccttcacgaacttgacggcgaacgccccgtccggagccaccttcacccggtggtccgccaggaaggacttcaattcggaaacgatgaacttcatctgttccggataggaagtcctggacggagacggggccaggatgcgaacggactgcacgcgaatggccttgccggtccagtgcagctgctggggcttgggaaccaggggcggctggtccgccgggaacagcctgtaattggctccgttcgccgggaaggagggagccgtatcctgcccccacgccccggcgcacgccatgcacatccacgcaaacgataataaaaggaacttcatgcgggtaataatacgcccgcaaaggcccctgcctgtcaaatctatcgtgttccacagcccggaaaacgggttcccggcagcggtttttgcaaaaagaccagaacccgcgcctacatgacggagggaggcttgacggcctgcgcggcggggtggtcttcaatctccccggtggttccgttcacggccacgccgcggcgcacggcgtaaagccccgcttcctcctccttcttcccggccacaaaggcccagtagtaactgttccggtcatggtagcaggcccactctccggcaatgccggggcgcgcctccatcagcagggaataggaatccgcgggggaaaccttgaagcccctgggcgtatccagcccggaggagggaaaggaccggatgtcccccctccacaccaggtccaggggggaggtggacagcaggccgtccgcaagatggctgcccgccagcatctgcccggtgccgagcatgggcaggcaggaagagcacagaagggcgcctccgcagacggcggcaaggcgcaggaaagggcaaacggaaaaagtcatggcgtgttcctggaaaaaggcggaaaggaatcaacccccaaaagcttccccagtcaatcaaaaacaggcctttccggccgctccggcggaaaaatgcccgctccccggacgggtggacagcttgacaacccctccgcgcattcctatagtttgcctcccgtctgaaaaggaggtccgtccatggcagcccagtcacgcaacatcgcagaattggaaaacgcatccgtatggcgtctgctggtccagtactccctgccctccatcgccggcatggtggtgtactccctgtacaacatcattgacagcgtcttcatcggccacggcgtgggccccctggccctgtccggcctggccgtcaccttccccatcatgaacctgacctttgcgctgggcacgctggtgggcatcggcggggcggccatcagctccatccgtctgggcaagaaggaccaggaggggacggagcgcacgctggggaacgtcctcatcatgagcctgatcgccgccgtggtgctggtggttcccacactgctcttcctgacggaaatcctgaccgccttcggcgccagcgggcaaaccctcgcctacgcgtacgacttcatgctcgtcaccctgctggggctgcccgtcacgtacgtctttttcaacctcaaccacgtgatgagggccaccggctacccgaaaaaggccatgggctccaccctgctctccgtggggatcaacatcatcctggctcccatcttcatcttctggttcaaatggggcatcaccggggcagccctggccaccctgctggcccaggtcaccggcatggcgcgcgtgctgctccacttctcggacgcggccagcacggtccacttccgccgcggcatctgggaactgcgcaaggccatcgtcaccggcatcctgtccatcggcatggctccgtgcctggtaaacgtatgcggcagcgcggtcaccatcgccatcaacaggcagcttgcggaccacgggggggacctggctatcggcgcttacggcatcatcaaccgcattctcatcctgttcgccatgctcgtcatcggcctcacgcagggcatgcagcccatcatcggctacaaccacggggccatgaagccggggcgcgtcctgctcaccctcaagtacggcgtgctggcgggcacttccttcaccacgctgggcttcctggcctgcgttttcttcccccgcggcattgccgggctcttcacggatgacgccgcgctcatcagcctggcggccaacggcctcaccatctgcgtgctggccttcccgctcatcggcagccagatcatcatcggcaacttcttccaggccatcgggaaggcccgtctggccatcttcctttccctgacgcgccagatgctcttcctgctgccgttcctgctggtgctgcccaggttctggggacaggacggcgtctgggcctccctcccgctggcggacgtgctctccttcatcgtcaccctgctcttcatccggaggttcctcaaatactaccggctgaaaaacaggcactacctggaccacagcacggccgaagcgtgaagcccttccagggagcgccgcaggcctctgcggcttcggaatgaacaggcggacaaaggccgcgccctctctttccacactcgttcgctgacgctcgtttttccagcagcagcaagggccagtttcactcctgacggctcgcgggcaagttcagtccggccctggcgaaaagccctcttttccagctttccacacgttctccctgacattttgcgggacataacaccggcagtatgccgaacgcgccgcgctttaaggactctatcttgttgacggcttcgtgtgaaatcatcatgcggagccccgcccggcagacgccagggaaccgtcttccccatcagccggcctcctgaaggcggaacaacccgaacgacatttacaaggaatctgacaaaatgaaaaacggaatcatgatgcaatattttgagtggaacctgcccaacgacgggcagttctggaacaagctgaaggaagacgccccccatctggaagagataggcgtcacagctgtctggattcccccggcctacaagggcaaggaacagaacgacgtgggctacggcacctacgacctgtttgacctaggggaattcgaccagaagaacacggtccgcaccaaatacggcaccaagcaggaactccaggacgccatcaaggcccttcatgaacaccatgtgggcgtctacctggacgccgtcatgaaccacaaggccggagcggactatacggaaaaattcatggccaaggaagtggaccagcagaaccgggacaaggaaatcacggacgcctacgaaatcgaaggctggaccggcttcaacttccccggccgcggagacaagtactccgacttcaaatggcactggtaccacttcaccggcacggactacgacgccgctacggaaaaaacttccatcttcaagatcatgggggacgggaaaagctggagcgaaggcgtggacgaagaaaacggcaactatgactacctcatgttcgccaacctggacttcgaccacccggaagtggtgaaagaaatggaaaaatggggcgtctgggtatcccgggaactggacctggacggcatgaggctggacgccatcaagcacatcaatgacgagttcatcaagaaattcctggccgccgtccgcaaggacaggggagaggatttctacgccgtgggcgaatactggaagcaggacctggactccctgaacgaatacctcaaggaggaacgctacaaggtggacctgtttgacgtgcccctgcactacaacatgtaccaggcttccaagcagggccgcgattacgacctttccaagattctggacggcaccctggtccagaaccaccccacgctggccgtcacctttgtggacaaccatgactcccagtggggcagctccctggaatcagccgtggaagactggttcaagccctccgcctatgcgctcatcctgctcatgaaggaaggctatccctgcatcttctacggagactactacggagtaagcggcaacccgcccatgcaccgcggcatcatcgacaacctgctggaaatccgcaaaaaccatgccttcggggagcagaactactactttgaccacccgaacaccatcggcttcacccgcgtggggaatgacgaccacccgcattccggcgtggccgtgctcatctccaacggagaggacggggacaaggtgatgaacgtgggcaagcagcacgccggggaaacctggaaggaagccaccggaaacgtggaggaaaccgtcgccattgacgaggaaggcaacggccagttcctcgtccacggcggcaacgtggccgtctggattccggaaaacgctccgcaggaccccaagcaggacgcgagggtggaagacgaggaataaattgaatgattgccccaccggcaggcaagccggagcgggcgtggaggaacggcctgttccggcgccggaccatctttccggaaggcgggtcaggccgttctgactttaatcaccagtttacggagagccccttccccgatgcagccggcatgggcgtcctccgggaaaaagacggcgaactgccccggcttcacggtaaaagaggtgtccggcgcatcgtcgtaatgctgcgcgtccttttccatgttgaacggttcggaaggcttttccagggcagagcggtccttccacgcaaacccttcctcccgtgaaaggggaacgtggatgtcaatgaacctgtcgtgcacttccatgcgggccttctccggcttcttcatcgccggctcattcaccatcacaatcagggcgtcttcctccaggacgtgggggcccggttccagggaagccggaccggcctccctgacaaaatcgaaagcccgctggaaaaggggattcaaagactcgtaacgggcggaatcggaaagggaggcaataatcatggcgcaggctccatcccggagcggtctcattgtaacgggccggaaaagcccgtcaaaccctttgactcttttccatgggaattcccggacttgccgggacacggcgcacgccggcccccacttcccgctccggacaattcctgaccgggcccccgtccggcggaaggaaagccgtgaaaccggagtttcaggaaacggacggggaggcactggctccatccgcctccctttattgaggtattcctcccccgcggctgccaactacaagcatcaccagcgcaggaaaacaccttcttaacgtctccataatatattctgtttcaattacctaaaacatagagaagaccatgcatcggattaacaatccggagtcaagcatgaacatctgaaagaaaaacgttttcgggaaatttcccttgtccatactccgtaaatcgtcagcttctgttcctgatgcaatagattttctcttcgttccgcaacgaagcagggaagcccgaacttccgggaaagacgcgtctgtgaaaggaaacagccatgagatgaggagcaggctcccgtcctttccaggcgaaaggcaacctgcaaaagaaacggtggaaatgtttattcacggtggatttgcgcctcccgcgcctgggaacggaaggctcccgcctttcgtgggtaaaaaatctttccgcagcgcagcggaggttctccttcaatagccgccatcctgctccggcgagagtatccattagggccgggagttcccaattcccaggcagtatgcgggcttggaagaaaacgggaaagtgtttgttaaccatgcatttgagctttccttcgttcccgtttgaaacgtctccggagctccgcggattgttaatccggtagtttgcgaataattcaatcattccacacgaatatgaagaaagcattatacctcatcatccacctggccgtggcctctctggcaggcgtcgctgcggcggcaaccgtcgagctgatgcccgacatcggcgccatgacgggccagggctacaactcagcgggacgccttgccggggacggcatcacgggagacgacgttaaaaactggctcggttctcgggctgacggatggtacaccactaccggcaacggcgacatgcgctgggggaatgccacctccaacacggaagaccagaccatcaacctgcccagcatgtccggcacggcgggcgtctgcttcggtctgaaaatgaccattgaaaacattcaggattactccggcctgagcttcagcatgaacctcaccccgtccggaaccaccggaacgtacacgtattccgtctggtatgaaaccagggacggggaaatggtggaactctgcaagggaacgaggaacaatgacggctccccctggaacgttcactatgacctcacggaagaccagttgagagccatgaaggaaaacggcaacggcaaggtctatgccgtggtgggaagctccggaggccggggaggagataacgccaccgtggaagacctttccctggaagggacgctggccgtccccgaaccggccgcggcctccctgagcctgctggggcttgccgccatgatgctgcgccgccgcagggtgcgcgcctgaaatgtgctttcttccaatgaatcaaggctgttccttcaccggaacagcctttttcatgttccggcgtcttctccaggagcaaccatggagacggctttccggcctttccccttttccttcatccggcaattagtcagtcagaaaacccttccgtccgccggaaagcggtcccagccgttttccctgccttatgaacacgttattgcccgcgaggcaacgcaaaacgcttgccatcccgcaaccggtagtatattagagtaactgtaagccatcaactgcacaatgatcacacaaaagaccccatccagctcctaccggccttcctatgaccgcactcccaaatataccgtgaaacaggttgcggaaatgatggagatgtccgcctacaccatccgctactatgaaaacgccggattgattccggacgtggaccgcagcggaggcaatgcccgcatgttttcagactacaccctgggctggctgcgcctggttcactgcctccggatgacgggcctcccgattgaaggcgtcaagcactacatcgacctgtgccaggaaggggacaccaccattccggaacgcgccgaactgattttcaagcaggagaaaagcctccgtgaacaactccgcatcctgaaaaagcaaatggaagtcttgaagtacaagaagaaattctaccaggatcttttgaacaaccacaggccggacagctgcaatccgctgaaccacgtcagcgccagcgaaccgaacatcgctccggaagaataatctttcccttaaatccgcaacaggaggcatccgggaattccattggaattcccggatgccctgttttttccttcatttcccgtcagggagaaaaaccttcccggctgcccccctctccgaaggaaaaggaggaaacgccggaaaatccctgcgcttttatttgcttcccgtcgcctccgcatactccgcatcggtcacggggcctccccacgccgtcctgttggaagccgccctgggcgtgatgccgaggtgcacgaactcactgtccggagccgcgccgtgccagtgctccgtattggccgggatttccaccacggaaccgggcgtcaggcgccgggcggccttgccgcgctcctggtagtatcccgtgccttccgtgcagaacagcacctggcccacggaatggctgtgccagttgttccgcgtgccgggggcaaaggtgacgttataggcggacatgtcgtaatccctgttgtccaccagcatggctacccaggcttttccggtgaaattggccggagccggctcccctttggggaaggcgtccttcttcccggcagcggcggatacggccagaatggcctccacctgcccgtcagtcaggccgttgtgcttcccgatgcggatgtgggagttcaactggctttccgtgcccgtcatggcggccagggccgcgatggtggcgagctcccgggtcttccagtccatattgtcgcggccgaaaatgtccccgaacaaatgcgccttcaggaactcgtcaatggccggggcgaacaggaaaagatcccccttcaccggagcgccgcaaagcttcgtctggttggccgtgccgaagtcgatgctctttccggcaggcggcgctcccgcctcctctcccaccgtatcattgatgccgcgcgaggcgcggtccttcgccagaaccatcaactcattgagggcgttcaggctgcgggggaagccgcaataggcatacatctggaccagcacctccttgagctcgttcagggtcagtccggcgtccagccccgccgtcagggcgttccgcaggccgggcatgtcgcccctggccgtatgggcgctgatggcggcaatctgttgttcttttggcgacaaggcgcttgtatcgttattcatggtttgggcttctgaaaggttcatcagacaggcaagggaaaaagccattcccgcaagggttcgtttcataaggagcattatttgttgatggtgatcgtgtcattgacccacttgaccagcgcgggcctggccgtccggatgccttccccggcaaaagctccgcccttgagaacggtggacttggggcacagcttccgcacctcgtccccgcagcgcgccatgccgccgcctccgtgcgtcacaaacggaatcaccgtcttgccggaaaggtcgtggcttgccaggaaagaggcgaccggaggcgcaatcgtgctccaccagttgggactgccgatgaaaatcacgtcgtacttgcccatgtcctccaccctggcggccagctccggcctgacgccttcctgaatctcctttttggcctgtaccgtacattcccggtacccggacgggtaaggcttgaccggcttgatttcaaacagggttccgcccgtcgccttctgaatctgcgcggcggcgtacttcgtattgccgccccatgaatagtaggcgacgagcaccttggcaggttccacggaaaccttgggctgttcctgtcccgagcatccggcccccgtcatcagggcggccgccagcgtgcatatcattgatattgttttcatgaatttaatgtctgggttggaaggccgcgcagaaaacagcccgggaagaaaaacggcttcatccggcagtctccgtgcacgacccttgttccttcttcctgtctaaacgttagagcagctataagtcaacatgttttccctcatctgttccaaagattgcacccactccactctaaacactcttattcctctttccggagccggatcagcacgatttccgaaggaacgccgatgcggatgggaaagccgttccaaatccccgccccgttggagacatacagcttcatctcccccaccgtgtacaatccggacacaaagccctcgttgaaccgagccaccagccggtcaatgccggcaatcatgccgccgtgcgtatggccggaaacctggaggtccacgccgtgcgcggccgcttccggggccaagcgcggctggtgggaggcgaggatgcgcacccccttttccggggctcccgccagcgccttgcgtatatccggcacctccttccccatgatgccggctacaggatccgtcacccccgccagcaccaccgcatctccccccgtcaacacgtgctcattgtgaagcatccgtatgcccagggtgggcaggaacttcatccactcctcataaccggaataatactcatgattgcccggcacgccgaacaccccgtacctggccttcaaatccgcaagcggcctcaaatcatccccgtgcacgggaaccgtcccgtccacgaagtccccggcaataatgacgatgtccggattcagggcattcgtgcgttccacaattttcctgatgcagtccgcccgcgtgatgccgtccacatgaaggtccgccagcacggcgactgccaggccgtccgccccatccggcagatggttcacggaaatcgtttcctcctttacccgcggcaccccggtgcctccgaccatccccacggtagccagtacggcggcgaaagccagcaggacaaggttcacccggttgccaatgatgcggaaccgttccgtcctcttcttccgcaggcagaacagaaccagcaggtacaggaggcgcgccgcgtccgccgccagcagcaggaaaaagaacaggaaaagcacggagaacagccatgcggccgccagcaggacgccttccggcagaaccggggagaaaaacatggggccgccaaacaaatgcagcagatggaatttgaacgccgccaccgccagaaggacggcaagcagggccttccagccccatttcagcctaagcggcagaatggcgcggcagaaaacgtaaaccgccagcagtgctccgaaaatcagtatcatgtgtctcttgcttaaaatggcttgaaccccgccggaacgggaagaacactgtccttcccctgcgaacaaccggcagacggcttatcatgttgagtccctcaccgtaatcagctcccttcaaagtcagccgcagaacctccttatttcagatgctcctgaaagaactgctcgattttgccgaaaggaataaccccggcttgattgtcatagaggtccacatggctcgcgccgggaatgatcatcagctccttgttatcccccttcaatttcttgaaggcatcctcgctgaaatagcgtgaatgggctttttctccgtgaatcatgagcacggcgctgcggatttcaccgctgtacgccagcaggggcatattgatgaacgagagcgcggaggtggtattccatccgccgttcgagttgagcgaacgcttgtggtagccgcggggcgtcttatagtaattgtagtaatccttcacgaatcctggggcatcgtcgggcagaggatcgggcacgccccccgcgagcgcataagaaccgttcttcgcatcggcggtgcgctgggcattcagttgtttgcgaagctcataacgggcgtcggcgtccatcgcgtcgaaatagccgttcgcgttcacgcggctcatatcgtacatcgtggacgctaccgtcgccttgatgcgggtgtcgatagccgccgcgttcaccgccatgccgccccacccgcaaatgccgatgattccgatgcgttcggggtccacgtcgtcgcgtgtggagaggtagtcgacggctgcggagaaatcctccgtattgatatccggggaagcgacataacggggttccccgccgctttctcccgtatacgagggatcaaacgcgatcgttagaaaaccgcgctcggccatcgtctgggcatagagcccggaagattgttccttcacggctccgaaggggccggaaacggcgatagccggcaactttccgccagccttccgggggatatacaaatccgcggccagcgtaatgccgtagcggttgcggaagcttaccttgcggtggtctaccttgtcgctcttcggaaacaccttgtcccattcctgcgttaaattcagttgttcgttcatgatcctgtccgtgttggcgttattattttcagcggataagctccctgcacagcaaatgcaggcggagaaagccgcgcaaaaccttttaaatgaataccctgtcatctttctaatacttaaggtgaattattactttccgtaattgatcaggtacaggactgactccgggtcctgatggcacaggaaaaggctctctccgcggtccagcctggcgatggcccccatgtcctcccgggaaagttcaaagtcaaagacgttgaaattctcctccatcctttcccggtgggtcgtcttcggaatgacgatgacgccgcgctggatcaggaagcgcagggccgtctgcgccggagccttgccgtacttctctccgatgtccttcagcaccggattcgtgaaaaatccattgcggccttccgcgaagggcccccaggattccatcctggtaccgtacttcgccatcagctcccgggccttcacctgctggttgaacacgtgcgtttccacctggttgacggcgggcttgatctcgcagaactccgccaggtccacaaaacggtccggataaaaattgctcacgccgatggcgcggacctttccggcccggttagcctcttccatggcccggtaagtgccgtaataatcgttgaagggctggtggatgagcagcaggtccacgtaatccgtgcgcagcttgcgcagggactcgtcaatggaagccttcgccttttcatacccgccgttggtaatccacaccttcgtggtgaggaacaattcctcgcgcggcaccccgctcttctccgccgcgcggcctacggcctcctcattgccgtaaatctgggccgtatcaatggaacggtagccggcgccgatcgcgtccagcacgcagcgctcgcactctgcggcgtcgggaatctgaaaaactccaaagcccaagatgggcatgacaactccgttgtttaatgtaacttcttccataactgtttttgttttttattgttatttgcttcaggataaaaactttttttgcatctgtctgaatgactgtgtttaatattttccgtaacggcttgcgaagcggcatctgtgaattgatccgctgtaagatgatgtgccgtgattattcaacttttaaattgtacatatcttgttatgaaatttatttcaaacggcccaatagccacgctatattctgaccgagatttttcatattcgcgacggcttcttcatctttcatcgcctcaccgggcagacggccataagcgatgttccaataagtagagcctgcaacaaacatttccttgttcaggaagaaatggttgatcgtgtcgatcgcgttcatggccccggcacggcgggcaaccgcaaccgctccacctactttgtggcggaacatccccggatttgtgtcgctcaccacgctggccctttcgataaccgctttcagtgtggacgagacatctgccgaataggtggaagaccccaggataatggcatccgctttcaccatcttatcatacaattcctggaaaatatcattgccgaatacgcagttccctctccctgcacagccgaaacacgccttgcaggcgttgaccgtggaaccagccaattggacatgttccgtctcatatccttcttttcccaattctgccaagactacattcagcatatctgccgtatttccgtctttccgtgaactgccgttgattgccagtgctttcattttccgctctttgtgtgcactattggataatcccggcacatcggcggcatttgcggcggcgatgacgagccccatccctcctgcggttgccccacccatctttctgagcgcttcgcgccgtgtcatatgcttttccctgctcatttccaactatgtctaggattccaaatttacatcatatcctcatccggcatccgtacccggtctcctgtgaacatcatcaccaatgaacgccctgctgcggttccagctccttcagcgcatacttcctggtacccaggcctatctgttcggcataatccaccgtgtgccgcccatgacggctttcaatgcgctcgatcaggggtttgctgttgtctccggcggaaggcttgacggcgtaaacgaggtccaggcaggcctggtccagcgccaccgggtcaagggaagccagaatgccgatgtccttcatctccgggtcatgggggtgggcatcgcaatcgcagtcaatggacagcttgttcatcacgttgatatacagaatcctgtccccgaagtaatcggccaccgcctgagcggaggcggccatggactccagaaagtcgtcctgcgcggccagattgttccacacggcggcaacgtcccgcgtttttccggcggaatggatgtacgccttgccgcttgcggaagccacgccgatggactggttcttgatcacgccgccgaagccgcccatggcgtgccccttgaagtgggccaggttgatcatgaaatcgtagttcttcagatggctccccacgatgtcgtattccaggtgcttcctgtcctttaccgggatggtgaactctccctccgcgtccatgatgtccaccctggcaatgtcggaaaaaccgtgctccttcgcggcacggaggtggtcctccgtccgggaccgcttgccgccgtaagccgtattgcactctacgatggtgccgttcacgcggtgcaccaggcccttgatcagggccggactcaggaaattgcggccgcccggctccccggtgctgatcttgacggccgcctttcccgtggccggacgccccagggcctcgtaaatccttacgagagcctccggagaaatctccttcgtcatccataccctggaagctccgttcttctccgcggccgcgcccagcgcatattccggcaaggccaggcacgccagggccgcggtggaagactggagccacgctcttctcgtcatattgtttctcatggcaacttgattgtttgttcttgatgatcgttcttcgcgctctctccattgagacctttcaggccgccggacgcgttcatgttccggaaacgcggccgcccagcgtacggcagattctttccaccccctcaagcagcagtttccggggacaggcgatgttcaggcggatgaaacagccctccgattccccgtacatttccccgccgttgacgagcacccgtccctcttcctccagcaaacggacaatttccgcggaggaaagccccagcgcggagcaatctatccagaccaggtacgttccctccagcggcagcacgcggagctgcggcaggcgttcgcccagcatgtcccggaccgtctcgtaattcccgtaaaggtaaagcttcagctcctccagccagtcctctccgccgttgtaggccgcttccagagcatccacggcgaaggaattgacatcgcacacctcgttgatgttgatggccttgtcaatcttcctccggacctcctcatccgccgcgacgatattggcgatctgaatgcccgccagattaaaggccttgctgggggaaatgcaggtgacggaatggcgcagggcctcctccgaaagggaggcgaacggcgtgtagggatggccgggatacgtcagttcgcaatgaatctcgtcagccaccaccagcacgccgtttctgcagcagatatccgcgatcttctccagctccggcctcgtccagacgcgcccggcgggattgtggggattgcacaggagcaggagcttgacggcgggatcggacgccttccgctccaggtcctccgcgtcaagcgcgtacttcccgttctcgtacttcagcgggctggtttccgccacgcacccgttattgcggatggaggaaaaaaagcaattgtacacgggcgtctgcaccagcaccttgtcccccggagccgtcagggcccggatgatggcggacagcgcgggcaccacccccgtggtgtaaataatccactccggactgatcttccagccgtggcggcgttcaaaccagttcgtgaccgcctcataataggaatccggaacccgcgtgtagccgaaaatgccgtgttccgccctcttccggatggcctccgtcaccgccggagccgtgcggaaatccatgtccgccacccacatgggcagaatgtccgcccggggcatggaatcccacttgtaggaattcgttccccggcgcggcacaacggtgtcaaaatcgtacttcatgctgcttctcccgactgcgtttttcctgtttcaatggagcagttggccggagccttgcagtgctcgtccagaataacctccccgtactcttccgccacgatgcgtccgctgcgcgggttcttgacgctgtgcactcgccccttgatttccgcctgcacggaggaatattcaaaacaaaggtccgcatcctccccgaacgtgcagttttccagcaccaggttctccgcgtagcacaacgcctgcgtgccggaaatacggcaattcaccaggcggaggtttctggaatgccagcccaggtattccccgtccaccacggaatcgtacaccgtcacgtcctccgtattccagaaggcgtccttggaatgaatctccgcattccggatcaccacattcctgcaatactggaaggagtagttcccgttcagccggaaaccgtcaatgtccatattctccccgtgcatgaacaggtaatcgcccttgtccgcctgcacgttgcgcagctccgcgttccggcagtgccagcagcattccagggcgtccgtcaggaccacgttctccagaaccatcccgtccatgtcccggaacatcttgggggcttccacccgcgtatccttcatgcgcaggttccgggaataccagatggcggctcgggcgccttccctgaacaggcaattctcaatcagcaagccgtcgttgtgccagaaagggtactttccccggaactcgcaccgtacggcttcaatgtcggagcattccttcagggcggactctcccggataaatcgtgacgtcttccagcctcagatgatgggaggcaaacaaggggcgctccccctcgtaggaagtattcttaatcatttttttggtcatggtgatgggttggtaaaatgttcttttggaattcatcatatgcgtttaagcggcggcaatcggcatccggaaaaggaagaccgggaaaaagacggggagcggcattctccgcattcctggccttcttctttcttccttcaggctattccttatagtaactgtaatgcaaaggatttttagcattttctcgttcatcatttgtaatgtattcataattaataaatattaactgtcataaaaatcatttcatgaaccgtgaaatcatgaaaacaacttcatttttcagattcccggcacgatattccctttctgtacgccatggcggccgcaggggaaagcgcgcgccctttcccggcggaatcttccggaggcgttctcctcaccagcgcgatgctccccaggatgacgaacagcccggccatccgcgcccacgtcatcccttcccctcccgccgcgcaccccaggacgacggccaccagggggttcacataggcgtgcgtccctacttccgccgccggacgaaccttcagcagccagatatagctggtgtacgccaggacggagccgaacagcaccagataaaggagtgacagccacgcggaagcaggaacttcctcccaatccatgttctccggctccttccggacgagggcccagcaccagaacatcacccccgccgcgagcatctgccacgccgccccgcccacattgttgaccgcctcctccgcgcaggaacggtacttggcgtacagcgtccccaaagcccaggaaacgcagccgaaaaccagcagcaggataccgtgcgcgccctggccgcccccttcctcccgtccaagctgctccgcgaacaaaaggcccactcccaggaatccggccgctatccccgccaaaacggaaatgctccggaaattcctgcgccacatgggaacatccagcgcgataatccagatggccgtggacgatgcgatgatcgccaccaggctgctgctcaaatactgctgggccagcatgacgacggccatatccacgaaaaggaggataatgccgctgacggcggacttccggaccaggggaccccggaaaatatcctccccccttgcccgcccggccagcagcagaaggagccccgccgtgcagaagcgcattccgcccagcagaaacggagggaacccctgcagcgccgtcccgataaaataataggtggatccccacaccacgtaaatcatcagatacgcggtgatgactcccagccggcccggcggctccgtgattggataaacagccattggaaaacctccatgaactctttacttgttaaaaggagccgccttccttccggggaaaaccggagtcttccggaacaaccggagccttttcccgtacgtcagcatgcgccagccccattccagggggccgaacaggcagaacttcagccagacgcggctgaacagcgcctggaacaggaagacggaggcagctaccagttccacctgcgccagccccagccgggcccccaggcggaagcctattccgtaaaacaggacgatgcccagcacggactgcccgatgtaattggtcagcgccatccgcccgggagccgccagcgcccggaacaagggagcgtccttccggcgaaggaaccacaggcagaaaacggacacatacgccaggctgaggggaataacgctgacggcatacaggaaggccccggccacgggcccgccgcccagcaggtgaagcgcatgggcggcgtacaggaaggaaaggggcagccccgccagaaaaccgcagcggcataccctcttcaacagcgtccgccgcctctccagattcgcataaattccgttccttcccacatacagccccagcaggaacaagcccagcaccttgaagacgcggttgctctccagcagctcctggacgcggatgaacgccccggacagggtgaacttcagaacgtcggaataatgttccccgtccaccagccatctgccgaaattcgcgtccgtaatcccgctgagaccgttgaaataccgtactgcgccccccaccggggcggcgaggtcaaaccggtagcctgaaaaaaccttcagggcatccatgagaacggggcagaaaacaagcgcggcggcaatcgccagcagctttctgtccggcacattccggaacagcggcagcagcaggccggccagcgcatacagaagcaggatgtccccgctccacaggagcatcaggtgcagcagcccgatcagggccagaaggcccatcctgcggtaaaaaacggcgatgccgtcgcgccccttctccatggaatgggacatcatgatggaaaagccgatgccgaacaacagggaaaacaggctgtaaaacttgccgtcaataaacacgtactggaggaagcggaccacccggtcgattccggcggtgggcatggcggaaacaacctccggactctggaacgtgtacagggaaaactccggaaaattcgccaggcagatgccgaaaagcgccagtcccctcaaggcgtctagaatcacggaacgctcccgcgtgctgacgggccccatcctgtcaacgggaggcatccgcccctcctttcccatcaccgggcaccgcagcgcacgcattcaataaatgttttattttcatatcattaaaaaaatctcatgtatctttaatatcttttctcccaaaaaaatgaggcaacaggcccccgcccgggaaaaacagccttctcccgattccttaaaaaaggaacgctgccccatcccggagaaccgggataaaaacctgccggacaaaccggaaggtcagcgtttcacgtcaatggtcacgcggatctttccggaaacatccagcgccttcatcccttccccgtccacgctccccagaatcaccaggccgcgggacggctcgaaggccttcctgaaaatgcacaaattgccccacggggcgtaataggcgatggccccccggaagggtttccccatggccggagacccggcggtggacaacttgccgggcagagggctgatcttctcggtatcgccgtaatcctccagcgtcagcgtcaggggaagccgggccacgaaatccctggcggcggcattgtcctgaagagtggcggcaatttccttttctcctgctttaatcgtaatattcatggtgttcggggatggctggggagtctccggctccgcggcgcaacagggggcaaggaaagcccctgccgcgtacaaatatggtaataattttttcatcgtctatattttaataggaatggctgcccggcaggattgaacgggaccgggaatccccgcgaagaaggaaaaaacggctgccggccttctccggcaacggaaggcgcaccacaggcaggagagaagccggaaacattgccggagcttttcttcccgcggcgcccccatccccacccgggaaatcggacgccgcgggaagctgtctcacctatcctcgctgggcgcaaaaaacattctatatgaaatccggttgatattattccatgggcggttttacggctgatcttctttagtggggaaaaaggctcaaacccctatccccatgattctggcctgcttcatggccggattgcccttgatgccgcccatcttccaggccccggtgccgtaaaccacgcctttctccaccgccccttccaggcagtccagaaaaccgcggaagcactccacggtgcgctccatattggcccggttatcctccgccgcggccagaatgaagtaaaactccttgtcacggatgtccagataacgggggaccgtgcggtcgataaacgtcttcatctggccgcacagcgtataaaaatacacgggagtggccagcacgatgacatccgcttccagcagcttgtccagcaactcttccatatcgtccttctggaggcaggcgtgggtgtcatggcacacgccgcagccgcggcaatagccgatgcgcttctccgccaggcgcaccttctccacgtcatgccctgcgtcccgcgcccccttcatgaactcatcgcacaggaggtcggaattgccgcccttgcgcggactggaggaaatgattaaaatcttcttgctcatggtacaggctccccggcttacagataagacttccggtaaatggaaacgcaatcctccacggacagctccgcgcggtcgcactggaacaggaaccccatggtttcccgcgcattgtgagccattttcccgaactcctccggcgcaatgccgtaatcgctcatgcgcaggccgcttacgccgcaatcccgttgcagcctgtccagcatggtgatgaaatccatggggtccgccgcctccggcattcccatggcctgcgccatgcggacaaagcgttcatccgccacatgccgttcaatcaggtgcgtaaaatacgccttgctgatcatgatgaggccggccccgtggggcagctcctgatggtaggcggacaaggcatgctccagggaatgctcgctggtgcagcggcccacgcacatcacgtagccggacagggtattgccgaaggccacatgggtacgggccttcaggtcggagccgtcggccaccgccctgggcaggtagcggctgatatgcttaatggcctccagggcgtacatgtcgctcatcaggttcgtgccgttggaaacgtaaccctccacgctgtggaacagggcgtcaaagccctggaaggccgtaaacagcggaggaacggtaagcatcagctccgggtccacgatggaaagcgccggaaacaggtccggatggacaaagcccgtcttttcatgcgttttctcgttcgtgatgacagtgcccgcgtccgcctccgatccggtgccggcggtggtggtaatggcaacgatcggcaggggcctgttggaaaccgacttccccttccccgtgccggagggaatgtaatcccagtaatcgccgtcattcactgcgatcagcgcgatggacttggcggcgtccatgcagctccctccgcccagggcgatgataaaatcgcagccgtgttcccgggcgaaccggcctccggcattgacggttgaattcaggggattgggctccacccggtcaaagatggcgcaggcgattccggccttgtccagttgccccgtgaggcggtccagataaccgttggcccgggtggatttcccgttggaaatgacgatcatggccttgcggcccggcaatgcttccgcatgcaggttctccagttgcccggccccgaaaagaagccgggtgggcacatgcatgagaaaggcggaatgggtatggtttgacatgatgacaggttggtttaaaggccgcttcccggactcccggaacacccgtccggaaacgggaagcaacacactacctatcatctaaaaggttacacctgctctaatgaaagaaaaatcttaaaaataattttatctttattttaaataacttattaccaaatatttccgacacaaaaaaataattatcccctgccatttcctcctcaaaaaagagacgatttctattcattccccccaccgccacggagaagctccgcaacaatggaagctcatccggactccggttccccactggaacctttcattccttcgcaagccgtttcaaccgagggaaaacggacccggcttcatcaaacgcagtccctgtttatttccgggagcggcgccacaaaaaaacgctcaggaactccggccagggtccggcttacggccttatggaacaggatggcttggaagcctgcaaatcggaattatccatttccacggccagccagaatacgccgacggccaacaggccgaaagcacaagcccccgcaacggaaagaacggtcatcaccattttctgccgttccgcctttgccctgcattgacggaccagcgtttgcactgcgccgcagactgcccccaggcggccgcgccatccttcttccccggagggctgtcttttgggatgcaggtcgggcctcatcatcacggaatacgggaacggctccggcttcatcatggaaatgtccaaaggcatgtacttcatgacttcttttttaacgatattcgttaatcagtcaacatatttttcacggatttaatttacttctttctatcgacaattcacgaaaatcgtgtatcatcaaaccatgacaccgacaaaaggggacgtgaaaaactggctgaaagccatcggaaaggaccgtgactggctcgccagggaatgcggcacggagaaaggaacggtcaacaactggctttccccctccggccccttcccctccaacgccattttgaaaatccactccctgatgtcccaatacgggccggctcagccggaaaatgaggctatccagaccaaccgccttgtgctggaaatcacggaggaacgcatgaggaaatacgaaagggccgcctctgaaaagggagttcccctgcgccagtggctgacggaactggcggaccaggcggcggacgcgcgccagctccggacggggcaaagctccttcattcccttggcggaacaactcccgtcccttgccggacatgccgggcgcgaatacagcacgcagattgtcggcaacatcgccgcgggctcccttgcggaaagcgataccgtcccgtccaccatttacatggaaaggcccttgggcaaaaatgaatacgtggtccgcgtagaaggaaaatccatggaacccctcatcccggacggcgcgctggtagtcatgcggcgccatacggctccgcccgtccccaagccgggaaccatcgtggaatacaacgacggacgcggcgtcacgctgaaaaaactgatccggaagaaaaatgcggaaacgggaaaaatggaacatgtcctgcaacccatcaatcccgcgttcaaggatattgcccccatggagggaggcagcatctccggaatatacgtggaaacgctagcgaactaccgcaaggggtagccttctgccccatcatacaggaaaaggcgctccctgttccccatccactcccgcctctaaagccgtcttctctccctgcccggcggtgattccccctattccccctattccccctattccccctattccccctattccccctattccccctattccccctattccccctattccccctataaagccctatgataaaggacaatggatgaaagaacttgcagggtggaatggtatttgattaggtaacgcgaaaactgcgcctccggatgatttctcccctgtacggggctatccgtagcggggaatgggctgatacggcggacactctctcaaagcaaaacaaaaacaacattaaaaaacagcttctcctatgtcgaactcacagaactctcccatcccacccggaagtgaaaaacatcactaccacattcttgacggattgcgcggggtggccgccattgtcgtcgtgtggttccatatctttgaagcatacgccaccagccatgtggaccaaatcatcaaccacggctacctggccgttgacttcttcttcatgctgtccgggttcgtcatcggttacgcctacgacaaccgctggaaaacgatgacgaccggggaattcatcaagcgccgcctcatacgcctgcagcccatggtggcgatcggggcggtcatcggcgcactcatcttttatttccagggctgttccgtatgggatgtgtcccaggtcacggtcatctccctgctggtcgccaccttcgtcaatgtcctgctgattccgtcgcctcccggtctggaaatccggggactgggagagatgtacccgctcaacgggccaagctggtcgctattctttgaatacatcggcaaccttctctatgcgctgttcatccggaaactctccacgcgctccctggcggcgctggtgatcctggccggatgcggcctggcttccttcagcttctgggggcccaatggagacatatgctccggcttcgccatgaccggcacggaatggacaggcggctccctgcgcctgctgtactccttctccgccgggctgcttctgttccgcctgttcaagcccgtcaacatcaagggttccttctggctgtgcggcatctccctcgccatcctgctggccatgccccgcctgggaggagaagacgctttctggatgaacagcctctatgaaaccgtgtgcttcgcggtcttcttcccccttatcctcctctttggcgcttccggaaaaatcactgatccctatacggataaaatatgccggttcctgggcagaatctcctaccccctgtacatggtgcattacccgttcatctatctgtattatgcgtgggtgaaaaacggagacctctccttctctgaatccctccccggtgccctggccgtcgtcatcgggagcatcctgctggcctggctgtgcctgaaattctacgatgaaccggtccggagcttcctggcgaagcatttcctgaaacggaaaaataaccgcagccttgagccttcatcttccgtactccaaaaaaagacggacggctaaaagccgcccgtctgaatgcgaaccaatgttcctgctgtcgtttgattcggacagccgcttcaagcgttactgtccatcagtccagagcaggccatgaccgttatttacgcctgcctcacgcttggacagtttgcgtgatgacgactttttcataggctttaactccggccgcctcatggttgccatccgtcgcaaggatgagcgagccattccgcgtttcttccgcagctccggctgatacggtcacgacagcgccgttctcccaatgctccgcacctgcgtccagccagtcgggctttgaaaccagcgtccatgcagaaccggcgccggaattcagcgtcaacgaagagcttcccccggcagaaggcagatcaataccggataaaggagcattcgaattgcgctcaacccatttggaacgggaatagggaagcggctgcttgccgagccagtccctcagcttgttatcttccacgtgcgctatggcggaataaatttcactgttaccatgaaacagcaattgagcttcagtgatagcgtaaccctgtgaggccggcgtagcggcgataagcttcagttctcctgagggcgtcacgtaatacacgtccagatactggtggcggtaggcataaatgaggcgtgccattttaacattgtaaaattcctccggcatatcccattcataaacgctcagcacccccggagccacggcggaattcgagagcctggaatgatatttcacccggaatttgcgcagagcactgtcgatttgaagactgatataaatgccggcggcattgcctgtttgccgtatggtatgggcataggcataatgatcttccggaggagcggtaaaatccgcaaacgtgcatgagcccacctcaaaaacggcccgttcatccggaacaaaattgatttgtacgacaaccttgtccttgctccaccatccccacgggtttccggtgcctcccacttttaccggccttccgtcggcaggcctggagatattgaaccccataggccccttctgcttaaccgtcgcgttgaaggcgcttatcagaggtatgcaggaacaagccgtcaccttcgcgagcatgcgcccggtttccagtgcgtccgatgttacggggccgttcagaacgacagccccgttgaatgtttccacgcctgcgtgcgtgttgttgccggtgtaagtgccggatgagtcaggaatagcggcggcggaattccaggccgtacgctcttcttccgtaagatgcatcgttgtattcccggtatgtccggttacttcctcctgggatgccagggtgactccattgagaatattaatagtattcatggttttgtttattattgttacttgtaatgaagtggcatgacgactctgctgccttcatatccatgatggtaactccgaaaacattctcactcgcgaaaagcctgcggtcttcccggattttgacagcttcaacggttaggcggcttctatggtgtttccacaggagcccttttttccagccgggacaacaggaatctgatccagccatcccctagtttaacgtgtcctccattttccgaatacacagcaatcattgctgccacttcaaaaaaatcctgtatctgttgcagaaaaatagcatcctgcatgaagcgtcaacttcctccaggatatttctccaccctatcttaaaacattcatcgtcaatgattttctaaatatacaacagacagccttgattttattgactgtaacattcaggtttcagcaggcagtaacggttttgacgataattccggttactcgggataataggatactattagaacggcccgcaattgttattctctgaaaacaaaaaacttcctgaaattaggaagttaaaaatggagcggatgatgggattcgaacccacgacatcaaccttggcaaggttgcgctctacccctgagctacatccgcttggatgggtcagcggaccggaaccgaccgctggggaggtttatacgcccgttgcgggaaaaagcaacctttattttggcaatttccccatacgccatccatcctttttctgccgaactgcatcaaagtgtggcttataaatgaaattctctcgtcagaatgaaagacacattctatgctgtggcggcatgaaagaattgctcattaccctgatcacgctggcgggcctgttcatcggcgtgtattatcacgattccctggcgggaggcggacaggcagaccagcagaaggcggaagctcccgcctctgaacagtagtccccggcaatcatgaacacggctttccggaaaccctgtttttccgccattctctgcggagcggccctgctggctccgcaggcacgggcgcagtccgccgacagcgccggaatcctttccaccacgccgcagtccgtggaggacctccagcggattgaacaccagctccagcaggtgcttccccgggtgctccccgccctggtctgcattgaagtgaacaacggcagcggcaccggcattctggtttcggaaaaaggcctgattttttcagcggcccatgtcgttgataaacaaggaaccgtgctcaagatcatcctgccggacggcacccgcctgccgggaaaaaccacggcgcagaacagcgattcggacgccggaacggctgaaatcacgaccaaattgaacaagaaccttccccgcgtggagaaggcggagaaactgccccgcgtgggggactgggtgttcgcgctggggcacggaggcggcctggaccagaaacgcggcccgatggtgcgcctggggagggtggtttccctcaagcacggcgtcattcagacggattgcaagctgatccgcggggattccggcggccctcttttcaacctgaacggggaattgatcggcattcacagccgggtgggttccgggcttgaagacaatctccacgttcccatgaaggatttcgacgcactgatggaatctcccgcaggcggaaaggcccccctgcctccgtcaccggaacgggacggctagctttttccctccatggtcatgaaactctcctcctgcgcctgcctgctgcccctggcctgttcccttcttccctccgccctggcggaagggtttaacgggagcctggattttgaacagcgcatcaacgggaaaaccgttctgaaaaccattgagcccatccgggaacggctccaggatttgagcgcggttttcttttccggccatgacgtcgtgatttacggcattgtactgagtccggacggctacatcgccaccaaggcctcggaactccattaccaccagaacctggtggtccggataggttcctccaagtacggccatttcaaggagattggcacggacccggccacggacattgccgtggtgaaggtggacgccgccagcctgcccgcccccggccccgtcagcaatgaggccgccatgggcatgatggtggtcagcaacggctccaccacccgcacttccaggcgcccccagctgggcaccctaagcgcggcgcggcggcccatcccgaacggagacacggcctacatgggcgtgattttcggcaccccctgctccattcaggaggtcgtcaaggacggtcccgccgccaaggcgggagccatggccggagacgagattctggaggtggacggcacgcccatcaccacgctggaagccgtttcccccatcctgtccaagaaggagatcggggaaaaagtgacgctgaaggtcaggcgcaagggcaaaaagctttcctacgccatcacgctgggctcccggcggcaggccctgggggaagacgctcccgaggattccaacgacctgatcagcgggggcttcagcaaacgcagggatgattttccgatggtcctccagcatgacaccccttcccggcatacgctgatgggcggcccgctgctcaacctgaaaggggagctcatcggcatgaacatcgccagagtgaaccgggcggaaaattacgccctgcccatcagcgtggtgcaggagagcgtgcagcgcatcctgaaaaacgcgccgcagccggaaaggaagccgcagggggattcctgaaccgtcttccactcctttccggcgcagggaacggcccggcgtccatttttcttgtttttcctcccgcgcaacaaccggcaacaccgggcggattacatgcccggaacgtccgcggcgtccggcaccgtcttgggctgcacggtggggtcataatggacggctcccgtcacgcgcacgctgccgtccgggagaaagaccatggagggggtgcccatcacctttttgtagtattggagcttttccatggttccgcggtagttgatgcgggaatacgcgcccagcatgggcgtggtggggaagaagacgtgcacgttcgccttgccgtccaccatgcactgcgggcgggtggtgcccagccagtccccgatgcatacggcattgtaggccacgcccgtatccgggtccttcgtctgcacgtacagtttctggattccgcgcacggcaatagtgcagatggagaaggtgcaccgcttggcgctggagggaatggctacggtctgggaccacatgggcgtgcccgtccggacggcgaacagggatttctgggaggcgaacatgtccttctggttgggcattttcacgacggcctgcacatggtagttcccctcacgtgacaggtcatagaagtgccgcaggtcaattttacgggagacgctcatgccggccggcaccttgagcggagggaacatggcgaatttggactgggggagttccgcgcccgcggtggagtgctccacatggatgtccagccaggaggaatattcctggcttttcagttccacgggcacgccggagttgttggtgatggtcagcctcatgtacatggcctccccgctgaggaaggttttcttttccggaactactttcacatagatctgggccagggccccggacgcccccatcagggccagcagcagcattgcaaggatgtgtttcatggtattggtttgtcgagtatgtgtttttaaacaggtcagcggacgtcccgcacgattctgaagcccaggttgtcccggctttcaccgcgggagcgcaggtattccacccggttggtgatgccgggctgcctccagtccccgccgcaggccaccgggcccggcggctccttcacgcgcgcggggtccttttccatggaagaggtccattccatcacgccggaagccatgccgcaaatgcccgtctttaagtcgtaatcattgctgtatctgtcaatcaccagggtcttgtctcccttttcacccgtttccagcatgttccccagggccatccattccccgcgcgcgggcaggcggtaacgcggctctccgggggccacgggcttccagctcgcgtatgcccaggcatcccagaaggtgacgttgacgacgggggagcggggcgttattttcctgcccttccatttgcctcctgaagtggaggccgccttccacatggcttcccagtcctcggggatatgggtggcggtctgcttgtccggctggtccggatgggagtattcctccctcagttccggggtaaggcgcgcccactggtccagaaacaggcggtaggattccagggtaatttcatgggcccccacgatcagttccccgccgccgggaaggttcacgcggacttccgtatggtcgctggcgcagaaatccggatagtgtttcggcgccgggggcggagcaggcgtggaggtttcctcccgggggaataaaagaaaaacggcagccgcggctattcctgcgcccagcaggcccgttccggtccagagcatccattttccggagtttctgcggggttccacgggaacggtatagcggtgcgtggtggcgcgaggggaaagccccagctgttcgcggaccgcggcaatcagctccatgacctggtcccactgcatcggcttgccgttctggccctcccgcatccattccagcagggtgcgcatgcgggtggttccgggcacgtccggcgtcaccaggggcagcaggtcggcccccaggcgtttcatctgcgcacgggatatttcttcatgaaagtcgccgggcatggccgtattcatcagccgcacggcggatttgtcatccaggaagatgtggcgcggctccatgacgttgaaggcggtttgcaggcgttcatacctgccgcacatgccgccgaccgtttcaatcactttcagcaggtccttcatggacagggtctgcccgcggtccagcatggactggagggaggccccccccagttgctcgctggtgacgaaccagtacccctgggcctgggatgcctcatagacggttcccagcaccggcgcgctgacggcggcgcgcgtgcgggccttcatcagaaaatcctccacgcccacgccttccgggttgtccggctccagcagctccaggaacacggagcggtccatgccctgctggatggcctggtagagcatccccccccgcgtgcggccaatgaacgccaccagcgtatagtcgccgaagttgtgggggaggtcgaacatggacgattcaggcatcagggaggcagcagggagtcataggagtcggaaaccggagacgcctccaccgggggaagcaggccgccgtcataaatttcaggcatgccggaaggggaactctggttcatctgttccagcaaaaatagcacaggcggggaggcatggcaatccatcggttcacccttgtagtacaatttggcggtgtagccgtagtacttgaggcttccgtaagcgatcgtctcctcctccgtcagggggggcatatagtaggtcacctccatgatttcctctccgtccgcccagtccgcaggttccgtgacgcaccgcgaggagggttccggagcgtgcgttttttccacctttttgccgttgaccttgtcaaagaactggacgatgacgcgcaggtcctccggcctgacgttcaggccatccttcatcaggatgggtacgatcagcttgacgcgctccccggcggggcattccgggtcccggtattccagaatggtgccgaaggacatatcgccccgcaggtccgcagggctggaaaaaccggcctggaggtgctgggccgcgcgcgcaaagtatttccccgccttttcccgctgggtgtatactttcagaaaaaattcccgggatttatccgcattcctcagccattcataggtgaggccgtagtaataaagcaccaccgggttgtccggctccagcctcatggcctgctccagcttcaccaccgctactttaaggtctccgtcaatctgggcataccgcgccgccttgaccagctccgccacctcctccgtcatgggcggcatggcttccgccgggttctcagccggcaggggtgactggccggagacgccttcccctcccgggactggggctgccactgccgcagggaccgggtcgcccgccggatccgacaaatcggcggcccggagcatttcctccacggaacggggtttttcagaagaacccgccggaacggccgcaatgcctgccgtatccggttcgtccccttcttcaacagccgccggcccttccggattttgctgcaccggaacgggtacgggcgtttccaccactttttccaccaccacggtgcgggcggtcaggctgaaggagacgcccaccatcagcagcaggacgaacgccagcgcgcccagcgtccagcaggcgatgccgaacgcgcggtcacgggcgttcttttccggtggaagggattcgctcatacggcatcctcgtcatccttccgggcaggcgtgccgccggactccggagcttcttcatagtcaactacctcaccccggtaaagggaaagaagggccttcatgaaatcttccgcgttattgggggaatcctccttccggaagccgccgtaggtcaggccgtccagcctgatccggtcccctccgcattccgggttcagcgtcgcaatagccagccccttcatcttccatctgcgcaagtccagccgggcgatgtcatccacgtggaagaccctgccggcagccgttacctgcccttccttcagggccattttcctgccgcgcgtcctcaccaggaaaaacagcgccaccagggccagcaccatgcagatgcttccggccacccattgttcaaaaatcttggaggcgtcatacgggtggtccaccggcttgatggggtagcgtttttctccggaataggattgccacgcggcgctccagcccttgccgggggcggacatcagcctgtaatccgccagaacgtcaggccacggcgtcgcgtcccggtccacgccggacgggacctggtactcttccgggaattcaaccgtgcgctccagaacggtgcgctcccagtcctgcggggaggccccgttcccgctcacctcacggtcaaagagggctcccgcgtccacaaacgccttgtgcatgaaaaactccaggttcttctggggatacccggtggaagcatcgtaataaaaatacactccgaaccccaggaacatgagagccatgataaccgccctgccggtaaaccacatggtcggcttacattctaccgtgtcagactgcatgtttcttacataccagcaattccatgcccttgaccataaaaaaagtgcacggcatccacctttgcgggaaagcggggcgccatgccgcccggaggacagtccggacgcacggctccggaagaaaaaaagcctcggcattccccgccggaaacatacttgaaaaatcactttttaccttcttcttggcttgatttattttgtgaaagttaaataataacacgcgcagggattccccggcacggccataccggccgggaatgctgcaatcccgcacaccggccgcatcatttttaccgcgtatgaaaccaagcaatccccaataccgccgcatggatgccgatcccggctaccatccccaggaagacgaccaggtggatgccgacatggaacaggcccagctccgactggaacaactgcggaaggaaaaggaggaggtggaaagctcccgccgccgcctggaggaaacccacctgcgcaaggcccgcttcatggaccagcagaacgaactgggcgaccgcatggtcaacgccgcggacctcatcggcagggaggtggaaagccttcgccaggaaagcaatgagctggagcagattcacatggccctgacgcggagcctgaaaatgctcagcaccgtgcgcccggacgaatggcccattgaaaacacggacaacctcatcaaccagggccagcaggtcatcgaccgctgcgaggaggaattcgcggacgccgtccagcagtgcgcccgcatgcagcacaccaaggtgcttacgggcgtgcgccgttccagcaaggtgcgcatcagctcccgtgaattcatgacccagttcctccagggcctttccttccaccttcccctgctcctgattgcccttatcatcctcttcttcatctggattttcagcccctccgcatcatgattaaaagaaagaccaaacgccgttcctccgaactggcagaactggaccgcgcctcacgggaaattgagaaccgcatccaggaattggaagcctctctcaaacgtccggcccagcaaacgcgcatgcgcctggaccgcaataccatgcccccgccggaccgcgtgcgggaaggcacccagaaccgcgccctgcgcgccgtggtggcccgcgacggccgcgccaccaacatgaggcgggagctgcgtgaaaacttcatgctgctgggcctgctggtctgcgccatcgccgcctccttctgctggatcgtccgcctgctggaacagcaataggcctcaccctccctttctcttatatattacgcacgttcccatcatgagcacgccccaaatcgacgtagcctacattgccaaactggcgcgcatcgacctgacggaggaagaagccgccctcttttccaaggacctggacaaagtcctggcctacatcaccaagctggaatcctacgacgtcacgggcatcgcccccatgaaccatcccctgcccacgatggacgtaatgcgcaaggacgttccggaacccggcctttcccaggaggaagccctttccaacgccccccagcagtcccaggggcagttccgcacgcccaaggtggtggaatccgcctgacatcctcccggtccctcccttttcacgtttcaaccgttcttatccctttctttccatgtcaagcattcaaggcaccctggcccagtggcgcgaccgcctgcgccgcaaggaactttcccccgccgaactggtcaacctgacggcggacgccattgaggcggaccggaccaccaacgcctatatctcctttgaccgcgaggccgccctcaaggccgcggccgcggccgatacgtccagccccctggccggcatccccatcgccgtgaaggacaacatcaacgtcctgggccagccgacacgctgcgcctcccgccttctggctccctatgcttctccctatgacgccacctccatccgcctgctgaaggcggcgggcggcattcccctgggccgcacgaacatggatgaattcgccatgggcgccagcggtgaaaactccgcctacggcgtcacgcgcaacccgaacgctccggaccacatccccggcggttcttccagcggctccgccgccgccgtcgcgtccgccacagccatcgccgcgctcggttcggatacgggcggctccatccggcagcccgccgggcactgtggcatcgtgggcctcaagcccacctacgggcgcgtttcccgctacgggctggtggccttcgcctcttccctggaccagatcggccccatgacccggacggtggaagacgccgccatcctgctccaggccatctctggtcacgacccgaaggattccacgtccgcagacgagcccgtgccggactttgaggacgcgctgggccgtgacgtcaagggcctgaaagtgggcatccccgcggaatatttcacctccggcaaccatccgggcatttccgaggccgtgcagaacaccgtgaagcaactggaaagcctgggcgcggaactggtggaaatcagccttccccacgcggacgccgtggtggccgcctattatatcatcgcctgcgcggaggcctcctccaacctctcccggtttgacggcgtgcgctacggcaagcgggcggaagacgccgccggcctggtggaacttttctcacgcacccgtgaagaaggcttcggacctgaagtcaagcgccgcatcatcctgggaacctacgtcctcagctccggctactatgacgcctactactcccgcgcgcagaaggtccgctccctggtcgccagggacttcgcggaagccttttccagggcggacatcatcgtaggccccacctctcccgcccccgcccccaaaatcggggactccgcgctggaccacctccagacctacctggcggacatctacaccatccccgccaacctggccgggctgcccgccatgtccatcccctgcggaaccgtgaaggaaggcggcatggagctccccgtgggcttccagatgacggccccccatttccgggaagaccttctcttgaaaaccggatttgcccttgggaaataatcggaatttttcaacgcaagcgcccggcagactgtctcacccgctattaagaatcatggacacccgagaattcaacgaaattatcgccgcgaactcatcgtggatttctgctctcagaacggaggtaggcaaggtggtcatcggccagcaggcgctggtggacaggttgatcctcagcctcctctgcaagggacacgtcctgctggaaggcgtgcccggcctcgccaagacgctctccgtaaaagccatggcgggcacgctgcacgcgcagttcgcccgcatccagttcacgccggaccttctgccggcggacttgctgggcaccatgatctataatccggaggaaaggcagttcactgccaagaaaggcccgatcttcgccaatctcatcctggcggacgaaatcaaccgcgccccggccaaggtccagtccgccctgctggaagccatgcaggaacgtcaggtaaccctgggggaaaccacctaccgcctgccggaccccttcctggtgcttgccacgcagaaccccattgaccaggaaggcacctaccagcttccggaagcccagcttgaccgcttcctcttcaaggttctggtcacctaccccacgcgcgaagaagaactccaggtgctggacctcatggccagctccgccaagccgccggaaacctccccggtcaccacgccggaacaggtggcggcctcccgcgacctggtgaaccagatttacattgacgacgccgtgcgcggctacatcgtggacctggtgcgcgccacccgcttcccggaaacggtggacgtgaaactgcgcggcctcatccgcgcgggcgcatccccgcgcgccaccatcaacctggccctggcggcccgcgccaacgccttcatgcaccaccgctccttcgtcaccccgcaggacatcaaggacctggcccatgacatcctgcgccaccgcatccttctctcctatgaggcggaagcggaaaacatctccacggacgacgtcatcgaccacatcctgacgaaggttcccgtgccgtgacggcaggaggcggctcccccgtccgcccttatccttcagcccccgcggggcgcctcaccggaacctgattgaattcaaacagggaggatcacttcatggataaagcctcagacattctcaagcgcgtgcgccgcattgaactgcgcgccaggcatctggccacggaaaacttcgccgggcaataccagtccggcttccgcggccaggggctggactttgacgacttccgggaatacacgccgggagacgatccccgcttcattgactggaaggtgacggccaggatgaactcccccttcgtgcgtcgcttccgggaggaacgggagcaggccgtcattctggcggtggacgtcagcggctccatgcactacgcctcctccgcggcccgggcttccaagctggactatgcggcggaagtggccgcggtgctcgccttcagcgcggcccagagcggggacaagtgcggccttctcatttacgggaacagccactcccattacattcccccggccaagggcatcaagcagaccctgcgcatcgtccgtgaaatcgtagccagtaaaaacgacggggcggatcaaagcatcgcggaggtagcccggcagctcgtcctttcccagaaaaaggcagccatggtcatcatgctcagcgacttctggagcgagcacaacaaggccgccctgggacagctcaacttcaagcacgacttcatccccatccgcatcgcggacccgatggagctgcaccttccggacgccgggcgcgtcatcctgaaagacccggaaaccggcaaaagcatgttcctgaacctcgcccgccaggacgtccgggaagcccacgccaacgtcgtgcacctgcaccgtgaaaaatggacgcaggacttccgccgcctgggcatcgatttcctggacctccagaccacggacaacttcatgccgcccctccaggccctcttcaccaggaggtcccgcaaattctcacgctaaacccttctccgccagccatgccagcacccgccaccttccagactccccccacggccattccggaaccgccggccttccccacgctgatggaaacgcagtccccggacgcctaccttcaagcgggcttctgggatacgtggggcatctggatcatgctcgcctccatcctgctggccgtcgccatagccgtcatcgtgctcatccgcaggaaagggcgcacccccgccgcgccgctcagcccggcggaaaccgctatccgggacatcacgatgctccgggaaacccacccctccctcaggcaggccgccgtggaattctccctgctcctccggaaatacctggtgggggaaaccaaagacccggcgctgtatgaaacccagcaggaattcaaccgccgggcggacgcgctcaccgcgctcccctcggaactccagggtcccacgcgcgacctgctggaccgcatggcctccctgaaatatgagccggacactccggaaaacgactccctggtcaacgaactggcggacgacacggtccaactcatcaacgacatagaagcggacgcacaccgcacgaaggaggaaacggacctcgtcgtcaaaaaaccttccccacgccccaaccaacgctagcacaccatgacggaacacttccaattcgcacaacctgaatggctctatgtccttcccttcatcttgtgcctcattatcctccgccgcaggcggggggcggaaggctccatcacctacccgaccgttcgcttcatctcctccctggcgcgcaatccccaatccctggccggaaaaataggggccatttgcttcgtgctggcggcggcggccctcgccatcgcgctggcgcgcccccaaaaagtggaggataaaaccttccgcaccgtcaacggcattgacatcatgatcgcctttgacctctcctactccatggagacgccggacatggtcctcaaccgcatgcccatcaaccgcctggtggccgccaagcatgtcatcacccaattcgtcgacagccgtccggacgaccgcatcggcatcgtgggctttgccgggaaaaccaaatccttctgtccgctcacgctggaccacgccctggtcaacggcatcatccgggacttccatcctcgcatgatccaggcggacggcacggccatcggctccgccattgcggcggcggccacccggctggatgaccgcaaggacaccaaatccaaaatcatcatcctggtgacggacggcgcctccaactccggccagatatccccgctggtggcggcggaaaacgcggccaagctgggcatcaagatttataccatcgccgtgggcacggaagaaggcaccctggcgaacggaatggtggtgcaaagcgaatttgacgaacccaccctgcggaaaatagcccagctcacgggcggggagcacttccgggccacgaacatggcctccttcaacaaggcgttcgcctccatcggcaagctggaaaaaagcgaggccaaggtgcagaccgtccgccacattgaagaatacttcatgtacttcctcgtaacgggcgccgcgctgacgcttctgggcctctccctgcaagtgctcaaaccggcccccgccccgtaacaccatccctttcccgccatgaccttcctttatcccaacgttctgtacgcgctcatcctcccggccctgctcgcggcggcggcctggtggctgtggcgccgccgttccagaaaatgggaagtgctcgtctccccggaataccggcaggagctggttcacgctccggccacctggcaccgggtgctccccgtcatctttgccgtgctggcttccatcttcgccatcctctccatcgcgcgtccggtggacggctacacggaggtaaaggagattcccaaatcgcgcaatatcctcatcgccattgactgctcccgctccatgctcagcaaggacgcctcccccacccgcctgggaagggctaaaaccgccgcctacgacctgctggacgccctgccgggggacaacttcggcatcatcatcttctccggggacgccgtcctgctcatgccccttacccatgaccacaacgcgctgaaggaaaccatcgaacagcttcaattcggctgggtctcccagggaggcaccaatctggaaaacgtcgtccggctggccctccagaccttcaagcgggacaaggaggcggacgccaaaaacgccctggtcatcctcagcgacggggaagacaccgtcaacatcacttacaagacggcggaagccgccaggcagcaccagctcatcatcgtaacggcgggcatcggcaccaccatcggcaccaccattccggatgagcaatccccctccggcctgtaccgggaccgccgcggccagcatgtcgtctccaagctcaatccggaaagcctgcaatacctggcccggcagacggacggccagtatgtgcagctctccgacggagcggcgctgaaccgcttcgtcagggacatcgcggaccgcctggacatcacggaaggccgggaggaagtgcgccgcgtgccgaacgaccgctacgtcatctttgccgttccggccctcatctgcctgctcctcactcttctggcgggtacccgctggcgctccttccgccgttccggacgccgcggcatgaccgccctggccgccgcaaccctgctctgcgccggactgctgggcacggaagcgcgcgcggacacgagcgccctggacaacgtcacggacctgatccggacgggaaagacagaggaagccgtcaaggccattgatgaaatgctcgccgttccggacctggcggaagaaacgcgccaggccctggaattcgccaaaggctgcctggaacaaaaagcggacaaccccaaggaagccgcggaagcattctcccaggcgctcctttctcccaaagcctccctccaggcggattcccacttcaaccttggcaacctggaagccgcccaggcccgtaaaaccatgatcttctcccggccggaaggggaacaaccgcaggcgcagccctcttccattgatgaccagatcaaggaaattgacgcccgcctggcaaaaatacccgtggcgaaagaacacgtcaaggaagccgtcaagcgctttgacgacgctctctccgcctacggctcccatgaaggagcggccgccaacaaggaggaaatgctccgttacgacaaatctctggacgaataccgcaagcagttggaggaattaaagaagaaattggaagaggaaaagaaaaaacaacaagagcagcagaacaaggaccagaacaaggaccagaacaaggaccagaacaaggaccagaacaaggaccagaacaaggaccagaacaaggaccagaacaaggaccagaacaaggaccagaacaaggaccagaacaaggaccagaacaaggaccagaacaaggaccagaacaaggaccagaacaaggaccagaacaaggaccagaacaaggaccagaacaaggaccagaacaaggaccagaacaaggaccagaacaaggaccagaacaaggaccagaacaaggaccagaacaaggaccagaacaaggaccagaacaaggaccagaacaaggaccagaacaaggaccaagacaaggaccaagacaaggaccaagacaaggaccagaacaaggaccaagacaaggataacgccgcgggcaaggaaaacaagagggacgaaaatgaaatgaaaaacgcccagctcccctcctccccggaaaaagacaagctgcctgaaacgcccggcatggaaaaaccgcagcccaagccgcagccggaagaggacaagcccgtaccggtagccacgcaaaaggaaagcaaggaggaaaaggaacgccgggaggcaagagccatcctgatggaacgcagggacattgaacccggctgccccgttccccagcgttcgccggaaattcctccggacaaggattattaacccgttccgcccgcatccacgatgccaacccttcaaacatatcccgcaacatgatgaaaaaactgctcgccattctttcgctcttcttctgcatgactgtcacgctcatggctcagcaggtggtcaccacctggctgtccgacgccgttgtgccgggagaacaaacccgcctgttcatcatcctgacggacggcagcatcgcccgccaggacccgcttcccagggtgaagggcgccagcctgcgctgggtcagccagggcaactatatccgctggccggggtcccccaaccagtccgccttcctgatggccattgaagtaactccggacgaagtgggcaccgtggaaatcccgtccctgaccctgcaagccaacaacggccgctcctataccacgcttccccagacgctgaccgtctacccgtacagcgccatcaagtggaacacgctgaacctgaacggcactacggttccgtacggcatgctgtggcatgtggacaaccagaagccctatgtccaccagccggaccgttgcgaactgaaaatttatgctccggaatacattctggaatacacggcgcccaccatcaccacctccaacctggctacatggcgctttgaacccacgctggtggaattgctccgcggccagccccgcggctccgtgctctataaaggcgtcaactggaacgtcatgaccttccagagcactctgttcccgctgcgcgccggggaagtcacggcggcgggcactgtcacggcacgagccgccctgccggaagcggaccccctcatcgccaacttcatccgctcggaggtgctggtggaaatgtccattccggaagtgaaaatcacggcccaggaactcccggagggagcgcccgcctctttcaccaacgctgtgggggacttccgcatctccgccagcacggatgcccgggacctcagcgccaatgaacccatcaccgttaaaatcaaggtgacgggcacgggcaacatccacagcattgcctgcccggccctcacggacgcttccaactggaagctttacccgcccaacaagctggacccgggccagaacacgcgctccatccagggaaccgtggaattccagcaaatgatgcgcccgattgcccagacggacgccatcccgccctttgaactcaccttctttgaccccagcacgcaacagtacaaaaccgtaaccacctcccccattcccctggaatggaaggcctccgccatcaccggaacggcggccggcggagccgctcccgccacgccgcctccggcaggcaccattccggtagcggaaatgacggacatttacgggatcatgcccgccgccgtcatgaacgccctcaccgctccggcccactggggatggtacttcctggcctacatccccgccgtcgtcctgctgggcatggccctgatccgctacatccggagagtccagaaggaaagcttcacggcccgggaacgcatgcgttccttccggaggctctcctccacgccgcgccaggccagctccacggaattcctgcgagccgccggcaacttcattgaatcctacattcctccttccaagcagaatgaagaaatgaaaaccatccttcagctccgggatgacagggcgttcaagccctccggctcttcagacgaactgccgcacgcggaacgccagcacatgctccaggccattaaaaaagccatcgccaagcttcccgtgctcatcatggccgccgtcctgaccctgtccgtggccggagcagccggaaacgccgcggaaacggacaacctgggcgtgcaggcctatgaacagggagaatacgccaaggccattgactacttcagcagggaaagcaacgatacggacctctccaagtcggaacgcgcctatgccagcttcggcatcggcaactcctactaccgcatgaacaagcccggtctggccgccctcaactaccgccgcgcgctggaactctccccgtacttcacggaagccagatacaacctgcaattcgtcgaacgcaaggagggggccatcctccccgccaacaccacggaaaaccagtggctcacttacattagccatgatgcgctcggccccatctccatcctgtccggcgccgtcatgctcaccttcctggtgctcctgaccgtcacccgcaggcacggggcgctgctgaccatcctggccaccctcagcggactggtcaccgtggcggccatcatgaactacatcatgtacccggaaaccccggaatccatcccggcggaccggctgctggtcgtcacccagaaaacgcccggcaggcacgcggcggacatgaacagcccggcggtcatcaccctgccggaatccaccccgctcatcctgcgcgcggaacgcggctcctggtactacgccagcaccttccagaacacgcctgtctggatacccaggacggacgcgcagccgctgtaacgctttttatcccgccctcaccatgggccgcccttcccggaacaccgtatttccggaagggcggccttttttacggctgcgttaaaaccctcttcgcaaccggaagaggctggaaccagaaaatggcagcacctctgatgcaccgttcatgagcgttttcctcccttttccactatgtggcacggagatttgccgcctttccctgcttccttttccatttcaagtagaaaaaatctccggaaggtccccttccggagacgcacaggcgattccccggtctccatgaacaaaaaaagccaatgccccatcatatccacagggcacgcgtgtgttaaaaaccgttcgctggcgcccttccgccccagttgacgcaagggcttgcggcgctcctgatgatgcggaaaaaatccgtgcgccccgtttcgcccgcgggccggcccgcaccatggctcaccaggaatccagatgcaccttcctgcccggaggcggaaaagcctcgtccagcaaatccacatcctccgcagtcagcttaatggacaagctccggtaattctgctgaacatgcatgacggaaccggccttggggatagcaatcattccggggcggcgcagaatccaggccagcgcgatctgcaccggggtggcctcatgcttctgcgcaatctccatcagaaccggattgcgggacagccgcccttcatccgcaggcgaataggccatcacgggaatgtggcgctcccggcaccacggcagcaggtcgtactccacgccgcgatgggccagattataaagaatctggttggcggcgcaggagactccccccgggacggcataaaaacgctccatttccggaacatccatattgctgacgccccaggcctttatcttaccctcctgctgcagctcaatcatggaggcaaccgtatcttcaatgggatggggaccgctccagtgaagcaggaacaaatccacgtaatccgtccgcagcttgttcaggctccgttcgcaggcggccttggttccggtcctgctggcgttgccgggcagaaccttggtaaccaggaaaacacggtcgcgcaatccgcggattgccgttcccaccaactcctcgttgccatacatctccgccgtgtcaaccacgctcatgccaagctcaatgcccgcacgcagcgcctctacttcttcggcttccctcaaggcggattttcccatcttccaagttccctgccccagggcgcaaaccttccgatggtccggaaaaattactgagtgttccatcatcaactattctttctacctgatcgtacaattccatgctgtataaacctttgacagcatgcgagaaaaaaagctcaagaatcaggacgtttcccatggccgcctcatccaacttcttctccccttctcccggcgcggcgcaaaacacccctcattaaaacattactcaacatgctactggtgaacgcattttaaaacaacctcccatccgggcatgccggcatcaaaaaacccgcgcaaccgtcctgtcatacgtgctgcgggggcaccccgcctcctgcctgaaaaaatcttctccgtccctcttcggcaggaggccgcccctccggcacttcccctctttcccgtgaactttatccctccgctccttccggaaaagaattttctcccggctcttcacaggaacggcagccgcacggcgggagaggtactccgaaccattcaggctgaaaattgccggtgccgatagcccaggccataaccgtcctccttccgtgtggcgacagtaccttccgggaaaatccgcctctgcggacaaccgcagccgccccctctccgttcagccctgcaaaggtaaaatcaatcaaccggagtccacgccatttcttatcgcggcgccggcatccgtcaacgccttaatccctccacgggcatttcaacgccgttatttcccgggatctgcggctcctttccgttgctcgccctgaatcgtcattgcctgatattcctgataacccgggccggaacgccgcctacaatcgcgttggccggaacatccccggtgacgacggccccggcggccacgatggcattttcccccaccgtcacgccgggcaaaacggtagccccggcccctatccacgccttccgtcctatcacgatggggcgcccataaacatgacggcgcaattccggttcctccgcgtgattctccgtaatcagcttcactcccggaccgatcagcacgccgtcaccaatcgtgattccgccacggtccatgaacgtgcagccgcaattcacgaacgcgttcctgccgaatcgtgtaaaacggccgaaatcggtataaaaaggcggcacgatccaagtcgtttcatcgatcaactcccccgtcaattcgctcatgacagcccgcgtctctgcggcatcatggtagcccgcattcaactctccggtgatgcggaaggccctcgtgatcaactcttctatgaccgggtactcgggatcgtccagccgtatcaactctccccggcgcattctttccaatatatccatctgtttttcttttcaattcttcaagtgacaatatccatggaccattccgcgcccatggaactaccgggcgccccggcaacgggaaagcggagaaccctgaataaaatccatccacttactcttcttgtacgccatggccttctgccaatgatgcaataaaagaggctctcccgttcacacggtcccaataaaacctttccttccgttctctaatcgtgtgctccgggaacattaccgggaaaaagcttccatgggatactcccgggcagcaccaggcctcacttcaggtttttactgaaaaaatccgtcaatttgtcaaaagggatcatattcacccggtcgtacaggtccacatgcccggccctgggcacccggtaaagctccttcggctcggcggcgcgcttgtaggcgtcttcgctgaactccctggaatgagcttcctccccggtgatgaaaagcagggcgcggggagaaatcgtctcaatatcggaaaacggatagaaattcatgaacttcacgttgctggcaagcgtcggatgcgtggtaagctccggcgactgtccctccggagtaaactcgccgcggggagtgcggtagaactcaaaaaactcccgctcaatgggactggaatcttcgcgaagttcatgcacagtcccgccggtatacttgacgggtccgccggaaaactccacataccgctgctccgccgcttccgccagaatcttctttctctgaccgggtgtctgcgaattccggagaccgttccggctggcagctcccatgtcgtacatgctgacggtcgcaatggccttcaggcggggatcaatcttggcggcgctgatggcaaaactgccgctaccgcatatcccgatcacgccgatgcggtcccggtccacaaaaggccgcgtgcccaaataatccgcggccgcgctgaacgcctccgcatacatatccggagaaacggaattcctgggttctccgtcgctcccgccccagaacggtaaatccagggccagtgtcacaaatccccgttccgccatcttcgcggcgtacaggttcgcgctctgctccttcaccgctcccatgggatggcccacgataatggcggggcacctggcctccttatccatgtccttgggcaggaacaggttcccggccaccttcatgcgatactggttattgaacttaacctcctgctgggagacccggccgctcttgtaaaaattgtccgcgtccgagggcttgtccgccggagaagccatgctgccggacacggcaaaagcgcccagcgcggttgccgccagaatcccggcgttacgggtgatgataaatttcgtattcattggttgttctttcctgttttattgttccggcgttcccaccggaccctgccaatattaacaggcagaggaaaaaacaggtagcccggtcctcctgcattattgcctgatcctgcaaaatgaaacaaaatgaagttgctcccgcaccctgccttgaataacatgaagccttcatgaaggaaaaagaaaaggaacagggggaaacgtccgcctccctgccaactcctgcttgccgtcaacggaaaccgctgcgccttgccggaatgattgcaggctggacgtatgggaaacaccaggtgagcacggccattcccgggctggagctccaccgctgggaatcccccacggaaccgcacagctatatgttttccccccatctttgcctgatcgcacaaggaaccaagcagatcctgctgggggacgaagcctacctatatgatgcgcaaagttttgttgtttcctccgtggagcttcccctcgtctctaaaatcatggaggccagcccggaaaaaccttacctgggattgacgctggaactggatttacaggaaatctcccaactgatgcttcacgacagcgtggccacgcgtccggaacgccccacagaccggggcatcggcatcagcaaaatgactcccgccctgctcaatgcagtggaacgcctgatggaactgctggaaactcccgcggacatccccgtcttccttcccctggtgcggcaggaaatctattaccgtctcctgatggacgaacagggagggcgcctgagacagatcgtcgtggctgaaagccatagcagccagatagcaaaagccattgactggataaaaaagcacttcgaccagccgttgagcatcggggaactggcaagccgcgccggcatgagcccgtccagcttccaccagcacttccgtaccctcacggccatcagcccgcttcaattccagaaacgcatccgcctcaatgaggcccgccgcctgatgcttgtggaaaacatggacgcaggaaacgcctccttccgcgttgggtacgaaagccctacccaattcaaccgggaatacaagcgcatgttcggcaacccgccgcggacggacattaaaaggctgcaaaccatgccaatctgagaggtaaacggaagagagccgtcatcccgttccactacggattcttaccgtcctttcttaaaataacaggggaacagaccaaacaccaaacgatacggttgcggaaaataaagctttgatctgctcctctttcaagaagcagtgcatgagcggcttgcgccccgcgcagacatgtggactttcaattaacgcactcgtgagagtgcgactaaagatgctttcacggatagggccgccggaaccgtttcaatccacgcactcgtgagagtgcgacatcaccaattccggcgacgcggaagtgatgaaaagtttcaatccacgcactcgtgagagtgcgaccaggccatataagccaggggactttcattttcggtttcaatccacgcactcgtgagagtgcgaccaggctatcaccctggcggaatacaagcttatcgtttcaatccacgcactcgtgagagtgcgacgcgaggctggcgcgggcgtcgtccacgcgtttttggtttcaatccacgcactcgtgagagtgcgacgcgaggctggcgcgggcgtcgtccacgcgtttttggtttcaatccacgcactcgtgagagtgcgacggatgatgataaagccggatggctgaatactgctgtttcaatccacgcactcgtgagagtgcgaccaacgccgggggcctgcacttcacaatttatcaggtttcaatccacgcactcgtgagagtgcgacttccgcaagatgtaaaatcctgcattgataacctcgtttcaatccacgcactcgtgagagtgcgacatatatgtttcgtcgataatgttgcaggtcttgagtttcaatccacgcactcgtgagagtgcgaccaaaaataccgttaaagaagaaaggcgttcgggggtttcaatccacgcactcgtgagagtgcgacatgagggtgctttaccgggctatcagtgcagaggtttcaatccacgcactcgtgagagtgcgacgtccccggtatgattcccagcgaaattgaagcggtttcaatccacgcactcgtgagagtgcgacttaataaaaaaagcataataacaggggttacaaagtttcaatccacgcactcgtgagagtgcgacagggttgcaagtgcgccttgatgctgattggacggtttcaatccacgcactcgtgagagtgcgacattcaggcaatggaagaagccagaatcagaaaggtttcaatccacgcactcgtgagagtgcgaccaatagaagaaattgcaagttgttcaaacatatattgtttcaatccacgcactcgtgagagtgcgactggggaggactatttcgagagtgacgtagaagaggtttcaatccacgcactcgtgagagtgcgaccctgtggcatgacaaccgactccctgaccctgatgtttcaatccacgcactcgtgagagtgcgaccatgcgtcagtcctggcaggctcaacagcaggcggtttcaatccacgcactcgtgagagtgcgacgacaagtttctgagtaccatcaaccccttcacgggtttcaatccacgcactcgtgagagtgcgacccgctccagaatcatcatccctcaaatgtaatacagtttcaatccacgcactcgtgagagtgcgacatcaagggctacgggagccttgtcctctgctccgtttcaatccacgcactcgtgagagtgcgacgctgaaatggaacggctatgtagtcgccttgcacgtttcaatccacgcactcgtgagagtgcgacgtaaatgtcagacatctcctgcacgtatccacggtttcaatccacgcactcgtgagagtgcgaccgttcagcaagtcgttgctcagccccacgctgtcgtttcaatccacgcactcgtgagagtgcgactagtttcggggtcttccttgggggaaatacgcacgtttcaatccacgcactcgtgagagtgcgacctcttcatggcactaaggattaaagggtttcaaggtttcaatccacgcactcgtgagagtgcgacacgttgatgccaggaccgcgccgccgcccatcacgtttcaatccacgcactcgtgagagtgcgacaaggaagccaaggaatctttgatttacaaaatcagtttcaatccacgcactcgtgagagtgcgactcgtgcgccgtcttgaaaatagccgtgagtcattgtttcaatccacgcactcgtgagagtgcgacccggctgggttgactatgagaccgtcaagtccctgtttcaatccacgcactcgtgagagtgcgacagtgtgttctgaagcgcacgggcgttgttactttgtttcaatccacgcactcgtgagagtgcgacaggggccggagggtccccaaggaccccgtggcgagtttcaatccacgcactcgtgagagtgcgacctcttcatggcactaaggattaaagggtttcaaggtttcaatccacgcactcgtgagagtgcgacacgttgatgccaggaccgcgccgccgcccatcacgtttcaatccacgcactcgtgagagtgcgacaaggaagccaaggaatctttgatttacaaaatcagtttcaatccacgcactcgtgagagtgcgactcgtgcgccgtcttgaaaatagccgtgagtcattgtttcaatccacgcactcgtgagagtgcgacccggctgggttgactatgagaccgtcaagtccctgtttcaatccacgcactcgtgagagtgcgacagtgtgttctgaagcgcacgggcgttgttactttgtttcaatccacgcactcgtgagagtgcgacaggggccggagggtccccaaggaccccgtggcgagtttcaatccacgcactcgtgagagtgcgacgcggattttgtagtagagggatgaatttttgtggtttcaatccacgcactcgtgagagtgcgacggatacaaaaaaatatgtagaggctaaattcgaggtttcaatccacgcactcgtgagagtgcgacggcctggacgcctatggcttgagtatcaacagcgcaacgggtgttttgcgccaacctcccatggaggcacacatattccaggccgtaaaaaagagatgatagttgtcaagattagaaccccaacggattacgtaaatcgccggtgtcccgggaattttctgtgagcttggggttggcggaagggagaccgggagacgcgcttttcatgcgttaaaaagcccacatctccggcaaccagggcctgtgcacgatgcaggaatatcctagcctgttccctctttcccgtccagaattttgcaggcccctccccggaaaccgccttattctcttttccacaaaagaaaaggcgccccgggactgccgtggtcccgaagcgccctgcggaaaatatccgcggtttacataatgcttttgcgcgtccacctgttcaggctcaacagccataccagcgccagggagacggcggaggccaggcaggccagcaacggtattttcacggcggcggggagcccccccattccaatgaagttcacgaagtcataggaacactggacaaagaagaagtggcacaggtacacgccgaaggtgagcgccgccaccttgcccagcaccgggctgggcttgatcctgagcctgctgacgatggcaaagatggcaaaggtcatcaggaagacgttgatgccggagaagtaccagagtacctcaagcttggaatattggccggggaagtgcttctgcgtttccaggaagccgaagaacgtgacggcaaagccgaccaggaagaggggaacagtgatggcgagcatctttttccagctccaggccagcgggtatttggccaggtaatgggccagcaccatgtaccccaggaagccggcaaagttatagaacatgccgtacgggttccagtcgcaaacgcccagaatgcccatgttgccgtaattgccttcatagcccagcgccggggcaagcatctggaggtaggggagagtcatgctgaatacccagatgcccaggaagattttcacatccttccttttggcctgcgtcagccacgcgctcatgatgggcatgaagaggtagagacccaccagcatgtatacgtaccacaggggcgtggtgtcatagttgaagttgaagagaaaggtgtaaagcttgccgacggtggcgctccaggtgtagttgtccatcacgatgttggggctggccgtatgcacgcccgcggcaaagtagccgaagtagagcaagggaagcaccagggaccagacgacgagcggaatcagcacccttttgaggcgcttggagtaaaaagcgcccatttccatggtgacgggaaagagcagcacgccggagatcatggcgaacagcggcacgcacggccgcaccagactgccccagaagacggcggatttaaagttgaaggtgccgtcaaaactgcctacgaacggatcgcagcaatgggccactacaacgagaaaacaggccaggatgcgcaggaagtcaacccaggcgatgtgggtgccgtgggaggtcagtggttggttggtgctcatggatgtgtggtagggaaaattgccgcatcgtcgcggacgttccaggaaatatacccgtttcccggaaacgttctatcacaaaatggggaaaagaaacaaaagcgcccaggaacaggcctacgagagcggaagaaagcccgggaagaagctaaaaacagcggcaagccagtcagaagaggccgtgtttcctgtggatttcaacttttttgccgcccgaagggcgcaataaacgccgcaggccctcttccgtgctactttaacttttcaccgtttgccggagggaatttcttgtatccggcagagtttatcttttacccaaccgggtaagcccggttttcccgcccttgcaagaaaaatccctccgcagggcttcggcggcagttcatccaatgaaggccgcccggccttcattcccaggagggcgttttccgtttggactgcgggggcattttcctgcgctgtctttatactcataatcacgccgcctgggagccagggttcaaggctcccctcacgccccggccgtcttgaaactgcccggaggcgggatgatgttgccgtagcggtgaacggtttcggaaacggcttgttcccggaaatagcccagcagttccaggcgtccgttggcaagcacgggccggtccagcacttccacatcccgggcgcgtgcggcattcgccagagcctcggagatgcccgttccacgcaggaatttcacgccctgggctgcctccggcatccggtcgatgagttcggcttccgtctccaccgtcagggacgcatagtaaccgttcattttctgaatccagggatggccttcctccacgctcaggtgcagggctgctccgcacagtttcgcgcccagcagcaggatggcggcgtcagcgtcagacatgttttccacacgggccagtatccccttcacgggtacgtaacggaatgtgttgttttccccgtagatatgggaagggtcatgctccacgccgaattcctccatccaccacttggcctgggaaccggccgcggaacggatgcgcttggcgcagtccggcagttcggagcacagcttttccaccagcccggtgatgcgttcccccggcgtgcgcagtttctgcgggagcgccttttcctcccagcttcccagcatggtgaggtagttggggccgccggccttggagccgggccccatggaggagtggttccacccgccgaacggctggcggcgcacgatggcgccggtgatgacgcggttgatgtacgcattgcccacctgcaccttgcttttccacagggcgatttcccgttcatccagggactgaagtcccccggtgaggccgaattcggagtcgttctggatgtcaatggcttcctccaggttttccgcacggatgatgcccagcaccgggccgaagcattccgtctgatggaaccagcttccaggcttcacgcccaaccggatgccgggcgaccagaggcacgggttgtcttccgagggttccggcttgagcagccattcctccccgggttccagttgcgtgagcgcccggagcaggtcgccttccggttccttgatgagcggcgtcaccacggagctgacctcccaggagccccccaccttcaggctggctgcggcatccttcaactggcgcaagaaggccgggttgtcatagacggaggcctccacaatagccacgctggcggcggagcatttctgcccggaatggccgaaggcgctttttaccaaatctttcacggcctggtccgggtccgccgtggcggtgatgaccatggcgtccttcccgctggtttcagccagcacatgcaggtccggccgcagttcacgcagcattttcccggtgcggtaggagcccgtcatgatgatgccgttcaggcgcggatccatcaggaatttgtgggaaatttcattgcgcggcatcggcacgaattgaagcacgctcttaggtaccccggcgcgccagaacgcctggacgatctgccaggccgtataaacggccagctcggacggcttgaacaccaccgtgttccccgccatcagcgcggcggccaccccgcccgtgggaatggcgaagggaaagttccagggagacatcacgcaaacggtacccagcggtgtcatttccacgccgtcgttcatgccatcgcggtccagcccttccgcataatagcggcagaagtctatggcctcactcacttccacgtccgcctccgtgggcacctttccggcgtccctcaccatggctgcaatggcctccccccggattctggacagctcctgcgccgcctggtgcaggatttcagcgcgttcgccaacgctcttggacgcccaggaggcgcgggccttgtccgccgtgtccagcgcgtgttcaatctggtcaaagtccgcatacgcgaatttgtaggagacttcattgtggcgggacgggtcgcgccccacgccccacaggttggtcgtgatttcctcaccgttgatgaccaggggaatttcctcgccggatttttccttttccgcggcaatcaggccgttgatccattccgcattctgccgcagggaccagtccgtatcacgctcattggcaaaggcgtcccggtaatgcgtgggctgcacggggtccgtagcgcggttctgcgtacggttggggccgtatttcacgtcgtccttctcctggcaggcttttaagaaccgctttttttgcgcctcccagctccgggagcccggcgtcatgccgaagaggtcatgcaggaagttttcctcactggtgttttcatccagccgccgcaccaggtaggcaatcgcgctgtggaagtcttccttcagcaccacaggggcatacagcagcaggccgtccgccgcctggcggatgacgcgcgcctgatggttcgccatcccctccagcatttcaaattccacatggtcccggacgccttcccgctcacgcagcagcatggcataacacaagtcaaacaggttgtgggaggcaacgccgaactgcacatatctagcgttctccggcatgcagccgtaatggagcattctcttgtagttggcgtccacctgggccttcgtgccgtatggggcctgcgcccagtcatgcatggaggcctccactttctccatcgccaggttggcgcctttcaccaggcgtatcttgatgcgcgcgccgcccttctccacccgctccttcgcccaggcgcacagcttcatttgttcctcccaggagtccggcaaataagcctggagcacaatcccggcttccatctgcatgaattcatcctccatcagcgtgcgcttgaacgcttccgccgtcaggtggaggtcacggtattcctccatgtccagattcacgaatttgggtcttttggagccgtccggcagtgtcaccgcattcgtgatggccgcccggtacaggatgcgcaggcgctcctgaatcagctgcacggtttcttcaaaggccaccagatgaatctggctgaaaatggctgaaatcttgacggaaatatagtcgcagtccttgtccgccaggcggtccacgacctgctggaggcggtggtgggcctcgctttcacccagaatggcctctcccagctggttgatgttcatccggatgccggccttgcgcctgcggcgcaggtgggagcgcagttttccatcctccgccggaagaatcacgttggagctctccttccgcaactggctggtaatcatgggcatcactacgccgggaaattgtacggagaatttgtcccccagcttcatggcgaaccggtccgcggcggacaaataacggggaataccgtagccgtccagcaggtagcggaacagctccgcgccccgcgccggcgaggaagggcggaacacgcggtccgccaacgccagcgtaaaggccttgcccgcagggtcgttcatcatgcgctccatctgctccgcctgctttttctccttcctgcgcatcccggcattcgactgtttcagaatggattccgccagttccacagccttggcggccagttgctggtcagtccatttgtcacggcgcgccgccgccatcatgtccgggatggatgagtctgtcataacggtccgaagactagccccggacaggggcaaaatcaagccaatttgccgggcccttcctgtggagaagggaatcacgaagaaaaaacgcgtcccttgattccgtgacggcaaccgggaacccttcctgtccgtttccggaagctccggaaaaccgcatcaatcataccgcgcggcagccaggcgagccctcctcagctcttcccggagctggtgcgcgcgcctgccgcaaacgctggcgcggtccatgtcccgcacttcctccagaacggcaaccgcccggttgaaagcctcctcactctccgccgtgtgggcgtcccggtacagcgcttcttccagccggacccagaggggatgcaccatggagagcaggatcaactggcgttcttccaggggaagggagggatcatccgcccttttccgccacgcttccaggcatttccggatggaaggggcatcacaggcctggaaggattcgcagaggagcgccgccgtttcccggtttttctccaggcggcgggctgccgcgcgggcgttcagaaaggccggaaccgtgcaattcagtttttccaggcgtttcatcgttcccggataatcccggaaccaggcttccgccggcaccggttccaacgcccggcaaatggcggcggcctcctccgcagggtctccacccttcggaacgtcattcaccaaagtcaccgggcgcacgcgccgggccttgtccgccagcagggccgccttttcccgcagggatgcggcatgcgctcccccttccaccaagtcaaatacacgccccctggaatcaagcaaaaccaccgcaggcagcacgcgcacgccatgctccgccgcacgggacaggctgccgccttcttcccaatccttcacggagggacgtttgggcactgtgacaaactgcacgtcacggacatgttcatccagcgcacggcgttcttccgttcctggacggagcgccttcagccagcgggcttccgccgcgccgggctccgcagaaccgtacaccaccagcacgggaggcggcggagaaggaggcggggcgcaggaagcgggggaatcctccgcttccgcacggcccggaaccgccgtcaccagcgccaggcaaacagacgcaataaccgctgcaaccttcatgaaaactgccggcttcaggcgcgccggatggtaatgcgcttgtaacggccgtcgccttcctcggattccgtcgcaatgccttccatggattgaagggcattgtgcaccaggcggcggtggtaggcgttcagcggctgcatcttcatcggcttgccgctctcctgcacgcgttcggccagggaacgggccttttccagcaggcgggcctcgttgcgttcccggtagtgatcgcaatccaccttcacgcggggtgcatcctccatcttgcgctggatcatgcggttgaccaggtactggaggtcgtccagtctgtccccgtctcccccgatgatgtactgggaatccggggaggaaatattcaggcacacgatgccgtccgcctccgttacttcaatatccgcggaaaaacccagggaggccagaaggctcttcaaactctgttcagctatttcttgcaccgtcatcactttaattcaataggaaaatggttccataccggaaaagccgccccgcgccataacggcatgagccttttttccaatacccgattgacataaaaatcataacctatttattccccgcgtctatgaaaatttgtggaagttccgtcccatttcatgtacgcagcgtacccccgtcccgctgcgccggaaacgccgctgcgctgctccctcctattccggcttcccctgctccgctcctgtttattccacctccttcattccgtccgccccctgttccagacggtattttttcacggatgccggaatttttcctccttccggataagtctttaccaccaccgttccgtcatcctccagcctgacggttcccattcccgtgcggcagcagcccacctgcttcagcatggcagaggcggagatgcagctcttatcgtcggagacattcggttcttgggaaatgcggaaaatgcgcatatatgaagctcctgctcccgcttcatgaaccagaaccagttcaggaatgccgtccctgtccaggtccaccagcctcatgcacggttcccctgcgggagaaccggcaaagattcccacaatatggggctggtccccgtcttccccgcagaaattcatttccgccaccagataaattgaatcttcacccgagccatgggagcggtcggcatagagatgcacgcggctaatcatgccgtagggaatatccggatttttcggcactgagaggctctccaccggttccagatgcagggaacgcggaggcttcccgaacgccgtccgcgtgtccacggctacatccccgcggtcttccgcctgctgccctgctgcgaatgaagcatggaccacaggcagaaaagccatgccaatcaaacaagccttttccatagatgccattctctatcatataaacgtttcaagtcgagttcttttcaacgaatctccatcatccctgaacggaggctgctgacaaaacatgacagaacatcaccggaaaaagagaagtcgaacccttacccgtatagaagaaattcggtcccatcatgaacaagcaaatgaaaaaaaagacgccgcccatggaagacagcctcgctcctttcaccgacggaaaggaagcggaaccccattacacggatacgattgatccggagctgatcaagcccactccgaagcctacgccgcccaatgcggaaccctccgctcccggctccatgaaaatgccggacaataccacggaaaaaatcaaggatctggacaccatgcgctccaacggcatggaccagccgctcacaagcaacctgggagttaaaatagccaatgaccaaaatacacttaaagccggaagcagaggcccctctctgcttgaagacttccactttctggaaaaaatggctcattttgaccaggagcggataccggaacgcgtggttcacgcaagaggttccggggcacatggctattttcaggtatacaagtccctttccaagtacaccaaggcgggctttctgcaggatccgggagaaaagaccccggtctttgtgcgtttttccaacgtgcagggcttccgaggatctccggatacggtgagggacatccgcggcttcgccaccaagttctataccaaggaaggcaactatgacctggtgggcaacgacacgcccgtctttttcattcaggacgccatcaaattcccggatttcgtccatgccgtcaagccggagccccacaatgaaatgcctcaggggcagacggcccacgactccttctgggattatgtttcccttcagcctgaaaccctgcacaacgtcatgtggctcatgtccgaccgcggcattccccggagttaccggaccattgaaggcttcggcattcacacgtacaagctggtcaatgaagaagggaaaagcaccttcgtccgcttccactggaaaccggcgtatggtaaaaaatccctgatctgggatgagtcccaggcgttgacaggacgcgatccggacttccaccgcaaggatctctggcaatctattgaagccggggattatccggaatctgaactcggtttgcagctcattccggaagaggacgcagacaaattcgacttcgatattctggacgccaccaagctcattccggaagcgctggttcccgtggaaatcgtcggcaagatggtgctggaccgcaacccggacaacttctttacggaaacggaacaggtcgccttctgccccgccaacatcgtgccgggcatcgatttttccgacgacccgctacttcagggccgcatcttctcctacagcgacacccagcggcaccgcctgggcggagccaactttacggaaatccccatcaaccggcccgtctgccccttccacaataaccagagggacggcttccaccgcatgcagatagacaccgctccggccaactacgatcccaactccatcggggacaactggccgcgtgaaacgcccccggaagaaggcggtttctccaccgccccccagccggtgagcggcgtcaaggaacgtctcaggagcccctccttcgcggaatactatgcccagccccgcctgttctggatgagccagactcccgtggagcaaaggcacatcattgacgccttcagctttgaagtaggtaaggtgacgcgcccgtacatccgggaacgggtagtggacctgctgacgcgcattgacccaaacctggcagccggagtagctaaaaacctgggcattgaactcacggaggaacagcttaaccgggaactgcccaaaccggtctgcggcctggaaaaagacccggcgctgagcctgtacgccaacccggacggcaacctcaagggcatgcgcgtctccctgctggcggcggacggcgtcagcctgaaatccgtggaggaaatctgcagcgccctgcacaaggaaggcgtgcacccccagattcttgccccgcacatgggaagcgtgaatacggaggaagggaaagacctgcttgtggacggcaccctgtccggcaacccctccgtcgtgtttgacgccgtcatcgtgccggaaggagagcagagcattaaaacgctcctgatgaacggagacgccaagtaccacctgcgccaggcataccggcacctgaaagccatcggcctgcccggcgacgccagtgaaatgctggaagcaacggacctgccccgggatatggacgacgccgggctgctcacgccgaaagacaccaaggccctgatgaaacctttcatcacggccatgaaacaacaccgcgtctgggcccgcgaacccaaggcgctggatttcggcgcctgattcattcccattcagaaaccgattcaatacatcattaaacaggggctgccgcaccgaaaggtgcggcagcttttttatccataacggcagacgtccaaatgatgctccaggcaaaagcagcattcatgcagtcttaacgttccatgcgggatgacctttctccgggacagccgtagattttttccgaagtgggtttcaaccgtttccattttatccggggaatgtaaggcacttcaagccagggcgccgctggatcaaatttcagcccatccgcaaccgaaggaagggtagattctcatgaatcccgtccagagttgccctgaccgttgaagaagccagcccgcatggaatgtgcaggccttccatgccggatgagccggagttcatcatggataaggaggcgccaaagttgttcaactacctcactacaaccaataataaacaaaaatcatggataaaattacctccatcaacggaattttactgacggcccataatgatttttatgagcatgaaaaaaataattccgttcacatcacagaggatgaacgaacggcctggaactccaaggctgaagcatctgaagttaattccaaagtaagcacggaaacattcgatgcccacaaagcggacgcgtcagtccatatcacggaagaggagcgcaaccgatggaataccgctccccacttggatgagagtggcaatatgacgcttgcaggaagcctgacgacggcagggacctacaacgccaacggcggcatcaatattccggttgatcctgtcacggaaacggacgcggcgcgaaaacatgaggtcagggtacttaacgagatttccaatggagccgctcggaattatttcaatttttccacgcctccgtttggtaaattgctctcgccgttttcctggctggctacctattggcctaaaccggcaacggaaaatggctgggtggattttaatttccgatgcgcgccttttgggcaggaaagcgatcgtggggggtcttataccgctgtgaccggagtttttttaccactgactaccggtttgggatatcagcgcatgttccaggttgtcgctggcggattgttgaatgtcacgcttaatgaggagtggtccggacctgacgattatccgttttccagccctacggaaggtgtatccatgtggtgggatgtttattttggagaccagctcgcggaccaggacaacaaaattcccgcgcgcgggaggctttgcagatttaatcacaacaccaaacaggtagagctgttgagcaagacggcgctgctgcctgacaatttcaggctgcgggggattgcgataggatggggaaatgacggtaatgggggtatatgggttgtgggaaccaacgaaaagacggcaggccggctggaggcctaccgcatttgtgaaaacacatggctcacctcatcctatcacaattgtgtcaacatgcaaaatataaggctattatgtgatagagaagcgctggaggtcggagtggagccgttaaaaacttacacaggcctttacggggaaaaatccgtagtggcggaatggtgtgaaatgatggaagttaaatcatgatgaaagcacaaatacaaatacaattcccattgttgggagaatgggacaaattgaacatgactgccgtttttccctcttccggaggttttatagagtcccgcatttacacggagaacgacattcctccttctcatgctccggccctggaagctgtggtggaagcccttgtctccatgggcgcgccctggcaggtccaacaggtgtgggcgagagtggagcagttcatttccaaggttccggaaggagagcaggaaagtcctattgagatgacggagggtgtggtcctgacggttgacgccgtcaatgaaagcggaggacaccggagattcacctccgtccattatccggattttgtgctcatgaactccgccgctgtagattttttcaagcattttactaaataatagattgaacatcaacaaacaagatactaaaaaagataaacaggcggagtctggccgctgggggaggcgggtcaaatacctgatggcggcaaccatggcagcatcgggcgccagtggatacgttagacattccggggatgcgggggcggaatacacggcaagctgccatgccgccgccctgctccgggaatcaaggcatattccctattcccgggcacagccgggaacggacatgccgtccgttatgcagcaacatgcaagcaagtaatcatgtgcaccagaacccgcgcttacctgacgctcctgagagagtacaaggccgagattgtcatgattgtaggctttgctgccgctgcaatcatgtatgccgacatgcggacgttcatcaatgaacaaacccgcacccttaccgaaattaatttacgcctttccaatctcgaacaccaaactcaaaaataaatatcgcacccgaccaaggccagagtgtatccgcctggtaaaccacctataaaagaaaaccccgcaagccattaagcttgcgggggttattaatggtacacggagagggattcgaacccccgaccaactgtgtgtaagacagccgctctaccactgagctatccgtgcatgaggtggcgggaatatataccggagaacccggaccggcaaggagaaaatgagaaaaatgcgtccttctccccctacctgatgtccacgcgccggagcgcgcggtaatgcagaatgacgaagaggacgcacaggacggcttcagaccagtagaaaatgtccagggcgtcacggccggaggtgaagccgtaagagtgcaggcccacgcccagcatgttgacgccccaccaggcaaaggcgatgatgacgccgcccaccacgttgctgaagtggagcagccagggggacagccacccggctttccgcgcgtgcagcacggtcaattgccacagcacaatcatcagggccccgttttccttgggatcccagccccagaagcgcccccaggattcattgccccagatgccgccgaagaccgttcccaccagcgtgaataccagggagaagcacaggatgccgtaagccatgcggtccagggattgttccgttttcctgccgatcaggcgcaggggggaggccagcaggtacacatgggagagcaccgccgccagcaacccggccgcgtaccccagcacaatggtgatgacatgggtggagagcaggaagttggagcgcaggatggctaccagggggtccatgtggtccacggcctgggaggattcgtacagaatgcccatctggcaggagaaggcccccagcagaagccccgccgccagcacgatgccctttttgctgaacagctccgccaccagcgcgcagagcacgcccatgcacgcgatgaaggcgatggtttcatacgtgttgcccaccggggacctcatggtgatgagcacgcggatgaccagggccgccgccagcacgccggtccccgccgcacccagcagccacgcagggctgaacccgccgggccgcagaaaacggcgccagaggggagcgttggcggcaggacggaagagggcgcagagcagcaggcacacgaacgccgccacaaagacggccagggaggcatagagcgggtccaggcggtagtagaagatttccctttccaggctgtgccgttccccggcggaggcggcttcattgggctgcgccagtttttccagcagcagtccttccgccttcatccgcagtccggaggcttccgcgccttccatgccgatggccttgcgttccagcagggaggccattgccagaaaggctccggtggctttgtccggggcagccgtccagagacgctccccattctggcccgcagaggggaaccagcgggggaattccatccgttccatggcggaggggtcttccagcatgatacgggagccgagcatccagccgcgcaccacgtcaaagttgcgggaaagggccaggatttccttctgggcttccgtcaaatccgtttctcccagcagccggatttcccggacggcgcgggtcatttcctcccagtgttccgcaatctgcgcgtaggagtattttttccgcttgtccgcctggtccggcaggtgcagacgcctgaccacttcctcccggttaaccaggaaaacggggtattgttccgcgaattccgggcggaacatgcagtccagcatccattccaccggagagagtttccttttcccctccggcgtctccatggcaaagcttcttttgcccagggtccggagcagatggaagcccgcgtacgtggagacgggcttcaggcggccgccgtcctggacggccattgccccggcccgttccaccaggaaggaggaccagggcacgtaatgctccacccggaccggatgagaggcaggccgggccgccagcatgccgacgccgaagattgccgccaccagcacgcaaatgcctatcagtcgcaggcggcgcttgccgccgggagcgggcggctccagatggtcgtccgccgcctccgctccggcgggagcctggccgggtttgcggcgcaggtaccttccgaagacgcaggcaaagtgccacagcagtcccgcggcaatgatgtaggaagaccatttgggcatttgctccaggggattgtgggaagcgcggaggacggagatgagcctgcccggatgcagggagtcctgcccccagctcatctggtacagcgtccagccggaaaggcggagaggctcgttcatgcggatgacggcatcatactggccgccggattccggaaagacggttacctgggattcataggatttgggcttggaggtgccgggataaaattccggcacgaaacggttcaggcggaggtcaaacggcagggactgctcgtgcacccggtcgccctggggcagttccacctggtccacggccaccgtcattttattgcccagcatgatgccggccagcagcagcagaatgccgccgtgggccaccagcacgcccgcgtgcctccaggtccaccggacgcggaacatcccgcctatgagcaggttggcaaacagcagggcgcaggtaatgcccatgccgggcagcggcagggaaaccagggagttttccccgcccagcggcatcagcacatacggcgcgccgaagaaggattctatggccgcctccggccccatggaggaagacagccgcacctgatgcagcgttccggcaaacgtcagcaccagcaggatcagcatcagagcgatgcccagcccgtagcttccggcgaatttccagaggctgcgcccatatttcatccacaccgcatccgtgcgtttccagtccatcagcgtaaggcgtccgtaagtaaaaagagggccgatcacacgatcagctcgtgaaaccggccccaatcatgtttctggagaaaggacgattagaagttgtccgccagttcttcaaagaacgcctggggatgcacgcaggccgggcacaccttgggggcggtggagccggtgtgcacgtaaccgcagttgcggcacttccactggatttccttttccttggcaaataccttgccttcgcgcacgttttcagccagcttgaggtagcgcgcctcatggtgctgttccacagtggcaatctggcggaaggtttccgcaatggcggggaagccttcacggtcagccacctcggcaaacgtggggtacatttcggaccattcgtcgcgctcgccggcagcggcggccagcaggcattcctccgtagattccaggggggccgtgcaaacggtgtgcgttacttcaacgcaggcgtccttcaacagcttgaagaacaccttggcatgttccttttcattgtcggcggtttccaggaagatggcggcaatctgctcataaccggctttcttggccacgccggcaaagtaggtgtagcggttgcgcgcttcggattctccggcaaaagccttgagaaggttcttttctgtttctgttcctttgatggatttcataaattagtcatctggttgcgtaagcgggattatcctaatccgggcttgccgaaaaacaagcttttattgaatgaatctaaaaaatcattttcctgccgattttccggaaaaagcctcgcgccacgggtcatccagcttgcccggaacgctttccagctcccggaggattttctcccgctcacgggaaatgcgctcctggtccgcggggtccggcgcgggggcctccccgggcaccggcagcagcccgtccggcgttttgccgccgtccggggaaatcggcggggtgacctccttgccgtcttcatccgtccccggttccggattgtccgggtccgggttatccttttttccggagctttccggagcggccaggttccggtacaggaacaccaggtcccctgcctccacggctccgctgcgtatgtccgccggaatgcgcgcccggcccatacgttcctccgtcacgatcaggttcgcgaccctgcggttttcctccctgcccggagactgggaaatgagcacggttcccggctcgtaaacgttcccggccagcgcaatgagcacatagttgtggctggggtacacctgctccaccttccccacgtacacgggaggccgggcggtctttttgacgggccgcacctgctgggagcaggaggcgcccagcagcgcgaacgccgccagagcaggcagggaaaggattcgtttcatggggaggggcttttctcgtcgtttcattccaccagcaccttgcgcggacggttggtattgtccgccggggcaatgatgccgcgggattccagcaaatccatcatgcgcgccgcgcgtccgtacccgatgctcaaacgccgctgcagcagggacgtgctcaccttgcgctcaatgacagccacttccaggcatttggcgtagcattcctcctccgcgtcgtccagcgggctgtccgcccctccgcgggagggttcgtccagggatttctgaacctcttcatggaatttctgcctggcctgggaggcgcagtgggctaccagggcttccacttcgtcatcggaaataaaggcgccctgcgcccgctccacctgggcggaacccggcggcaggtacagcagatcgcccttgcccaccagtttttccgcgccctgcctgtccagaatcacgcggctgtccgtgccgctggccacctggaaggcgatgcgcgtgggaatattggccttgatcgtccccgtcaccacctgccttctgggcgtctgcgtcgccacaatgaggtggatgcccgcggcgcgggctttctgggtcaggcggccgatgttcgtttcaatgtccgcgcccaccgtctgcatcaggtccgcaagttcgtcaatgatgatgacgatgtaggggaagcgttcagggatgacgccgtcgtcctccaggtccagttcatcatcctcttccgcgggccattccccctgggattccaggtcacgggcaatggattccgccagggcttcatccacctccccgtcttccggttcctccgcctcttccgcaggcgcgtccggcggccgcttgttgaaggcttcaaagttgcgcacgcccaccttggcaaagcagtggtagcggtgctccatttcattcacgcaccagcgcagggcattgggcactttcttggggtccgtcaccaccggcacaatcaggtgcggcagcttggaataaggctgcatttccaccaccttcgggtccaccaggatgagcctgagctcatccggccggaatttcaggagcatggaggagataatgctgttgatgcacacggatttgccggacccggtggccccggccaccagcaggtgcggcatggatgccaggtccccgatcacggtgcggccatacacgtccttccccagggccagcggtattttcttcttgggggagcagaagccggggtcctgcaagagttcccgcaatggcacggccaccttgttgcggttgacgatttcaatgcccaccgtgtccttgcccggaatgggcgccacgatgttcacgctctccgccttcgtcgccagcgcgatgtccttcgcatactggtcaaaggtgttcacgcgcacgccgcgcgcggggtaaacttcatagcgggtgatggtcgggccgcgggtaatgtcccccggcgtcacgtccacgcggaacgtcgtcagggtatcaatgatcttctgctggatttccagcatttcatccttgtcctcttccgtagggccttccggcttttcttcataatgcagcagctcaaacggaggaagctcgtaatcccggaattcctccgtaggcggcgtggacagtttggagaaaggctgctccctgggagcgggcttgatttccgccggcttcgccacggtaatcctggggcgcggcgtcagcggaagatgcccctgcgtacgcggtgcgcggggggcgggagcggggtctgcggacctggcaggggaagccgcggccacttcattatataagccttccaggtcgtccccggtgcgctgcaggcggggagaggatgccctgccctttccggccggcctgggggcggacagggccgcatcttccatgctggccctcacgcgcgccgcctccctggcaagctgcgcggactggcgcgccattcttttctccttcctgttcatgcgccaggcgcgccactcccgcagcatggcgcggaacagcgggcggggatgcattcccgcggcataaaccagggccagcagatagcccagcccggaaagaaccagcacggcggacgtgccggtcaacggaagaagcagccccgttcccagcagatgtcccgccaggccgccggcgccctgaatctggtggcgcgccacccatgcgtcacccggcacatgcccggccgtcaggaacaggcagccgaacaacagcaggaaaaggccgccgtacaccacgctgcggggcagacttccacggtgcagcagacggtaaagcccccaccattccaacagaatgaccagcatccaggccatgccgcccagcgcccaataaagaatccccgcgccgtacaatcccgccacgcccagcacattggaggtgcccggaatcacctgaccggaatcatttaaataactccagcctatttcccgcacgtcaaacgtcagcatggccgcaagcagcgcagccccgcccagcagggacacgacgccccacgccattcctatccaaacagggggacgcccctcttcacgctcaaatgcatgatgctcctgcacatccaatgccatacctgccttctatcctaacaactccgcgcccccaactcaaggctaaacaaaaggagggggtccggaaggccgcaggtttctcccgattacggtggaaatgacagatttcaggaaggaaaaacccggaagagcctcctttccggactccaccgaacagcgtcatgcatagtccttcccttacctgcgcaaacggcttcattccccttcaaaccaacacaaatacagcaataaccaattcaaccttcctatcttattgattacactaattcaaccatatttctattataaaaagacatgttattcaatacttgggcacctgtaataaaatatccagcggattgcaaatcctatcaaaataatagggtacgataaattccatcataacacacttaattacatatatttatatacagaaaacaatagtttgagttaaatttttttagttttttaaggcgcgggaatgataaataagtattttttctttaatgattactattgacatcggatttgcaatccggtaactctgccgcgccgcttatgtacatacatatctgcaaaccgtttcttggaagcctccttgccggaatagctctcatcatcctcattccgctgctgctgaccgtttcggtacttcttgtactttctacagggaaatccccgttttttcttcaaacgcgcgtagggtacaggggaagactgttcaagatcatcaaattcaaaacgatgaacgaccggaaggatgaaaacgggcagctcctgcccgatgagcagaggctgttcccgctggggcgcttcctccgcagctcctccctggacgaacttccccagctcatcaacatcctgaagggtgacatggcttttgtgggcccccgtccctggattccgtcccaaatggccgcgttcccgcccaactactgccggaagcgctgctccgtgcgtcccggcatcaccggcatggcccagatccacggccgcaatggcatccccttctgccgccgcctttgctatgacctgatctacgtccagaacgtcaatctgagaatggatctctccctccttttccagacggcccgcacggtcgtcatccgtgaaggaatccagcagtgcaacgaggcgttccagagcaagctggggcagaccctcgttcataacgacctttccctgccctcctcccccccttcccagaagatcattctgaatacctccatccaacctctctccaaccaatgaacatcaacaacctaatcagcaaagccgccctctgctccgcagcgctggccgcttcctccctcctgccctcctgcgtcagccccaaggaagtcctgtatatccaggacgtctccggacagaccaatgaaaagatcaaggggaattaccagaccgtcatccagaaggacgaccagttatccatcaccgtcagcagcaagcagcctgaactggccgccccctttgccgtctccgaaatagggtccagcagccagggcaccagctcacgaaagggttacctggtggacgccaacggctacatcgtcctgccggtcatcggaaagatcaaggcggccggcaagacctgctcccggctgggggatgaaattgccgccaccctgcggaacagggactacatcagcgacgcctccgtcaacgtccagatcaccaacttcaagttctccgtcctgggtgaagtggcctccccgggcacctacaacgtggacggccagcgcctgacgattctggaagccctcagccgcgccggagacctgaacatcgacggcaaccgggacatcaccctgatccgtgaaaccaacggacgccgccagatcgccaccgtggacctccgcagcaaggacctcttccagtccccctattattacattcagcagaacgacaccatttacgtgacgcctgccgaacgcaagatcaacacccgcagcgataccgtccaatacatcggctggacggcttccggcctcggcctgattatcggcatcgttgccctgtgcgccctgtaagcgcacatccccccatttcccgcctttccgtcctccggaaaggcggagccttctttgattgattcctttttatgccagatactcctgctccccccgcagcccctcccgccgaggaaccggaatcttccctgtcactggatgtcatcaccagcatccttctgagacgctggtactggattttgctcttcgcccttctcggaggcgccggagcctattacgtgaccggcaagcagaattacatttttgaaaaaacggccagcgtcatcatgcgggaatccaacaaggattcctcctcctcggaccgcatcaaggtggaactgggcatggattccggagccgccaacctggccaatgaaagcttcatcctccgctcaagcacagtgatgcggaacacggtggaggacctgacgctgaacgtctcctactggaagcagcaggacctgcgccaaatagacctgtacaaggacagccccatcaccgtgacgtttgacgacatcgcggagaaccgcttctgcacctttgacgttacgctggagccggaaaacgccgtgacgctgacgtaccatgacgccgccggcaaccccatccaggagaaagggaagctccacgcccccatttccctccccttcgccaccgtcacggtttaccccacctccaacatgccggaaaccgtttccgggaccaccatcaccgtgcgccgcattcccgtgaacgccgctgcggaccagctccttgccaattttacggtcacgcgtccggacgccaaggaatccagcatcctgcaaatgacgctgacctccaccaatccggacaaggccgcggacacgctgaacaagctgatcgcggtttacaatgaccactccacggaggaacgccgcacgaaggcggtgaagacgaaggatttcatccggcggcagcgcggccagatcggcgcggacctgaaggaagtggaccagaaaatggatgatatcaaaatcaaaaacgacatcatcgcagacacggaagcgtccatctccgcagacttcaacgcggcccaaaccctggacaattccatctttgagctccagacgcagatgaagctggcggacggcctgaaggaaaacctggacgccctgggccacaaggcgggtctcatttccctggataccggcattgcggattccggggtttcccgccagattgaagcctacaacgccgcctatctggaataccagaaggtcgccggaagcgccggggggcagaaccccattgtcgtcaccctcacgaagaggatggacgccacccgcagcgcggcgtccaggtccctggacaatctccgcaacaatctggagctgaaactccaggaactcaccaggaagaggcaggacatcgccaagcggctgacggccacctccggaaaggcccgggagctgacccccctggaccgtgaacaccgggtgaaggaggaactttacctgacgcttttaagcaaggagctggaaaacgacctgacgctggccctgacggaatcctccgcgcgcgtgctggaatccgcccacggcacggattaccccatctctcccaacaccagaaaatccgtgctgaccgcggcggcggggggcgccatcgtctgcatcctcggcttcctggggctggccctgctcaacaacaagataaagaacaggaaggacctgaacgccgtcacgcaccttcccgtggtcgcggagcttccggccatgaccaagaaggagcagcggcaggtggcccgcatgttcacggatgaacactccgtcatttctgagtatttccagatcctgtgccacaatgcggactccatgctccccgtcacccggaaccaggggcacgtcatcctcctcacctccaccatgcagggggaagggaaaacgttcatctccgccaacctcgccatgtcctttgccaacatcggcaagcgcgtcctggtcattgacggggacctgcgcaaggcctccctgtccaagcagcttgacggcaagggccgcaaggggctgagcaccatccttctccgcaaggtggaagacccgttctccgtcatccgcaccctgccggaacatcccggagtggacatcctgtacgccgggccccaggttcccaacccggtcaccctcctttccctgccggaaatggaggagctcatccgcctcttcaaggaacgctatgacgccgtcatcattgactccccgccgtacggcatcctggcagacacggccatcctcgccagccacgcggatatttccctgtacgtcatccgcagcaacaggatagacaagcggcacatcgccaccgtccagcagcttgcggaatccggccagcttcccaacatgggcttcgtcatcaacgccgtggatttcaaatccagcagctacagctattacggctacggctaccactacggcaacacctccaagaacaacccctcctgattcccggccttgttttcctccctctttcaacccaggtttaaaaccgctgcgctctgtccggacggaatggatatgcactgccatttgctgtggggcgtggacgacggagcgcacatcctccgggacagtctggaaatcatttcccgattgaaagaaaaaggattcaggggagcctattgcaccccccacatcagcagccgctatccctccaacacgcccgcccgcctgaaggcccgcttccagcagcttctggatgcactgccggaccgggatttcgacctgcgcctggcggcggaatacatgctggaccaccattttgaacaggcgcttgaggaggaagagccgctcagccacgacggcagccacctgctcgtggagcttccccagttccgccttcccagcgcctggagggacaggctccaactggtccaggagaaaggcttcgttcccgtcctggcccatccggaacgctacgggaagatcatgcctccggaggaactggctgccctggcctcacagggaatcagcttccaggggaacataggctccctgttcgggctttacgggaaatcctgccaggcggccgcccggaaattccagaaggaaaacctgtacctgtggtggggaacagacgcccacaatgccaacatgctcaccaaactccgcctgtaacaccttccccgccgggaagggcgggacgcccgctttttccctgcatccgccgccatgaaaatcaccgtcatcaccgtttgccgcaacagcgccgccactctccaggacaccctggaaagcgtgctggcgcagtcctggaccggctatgaatacctggtcgtggacggcggcagcacggacggcaccctggaaatgcttcaggacgttgaagagcgcttccacgggcggctgaaatggatttccgaaccggacaacggcatttacgacgccatgaacaagggtgtccgcatgagttccggagacgtcgtcggctttctgaacgcggacgactattaccaggacaacggcgttctggaaaccattgccggagccttcgcgcagcacgggacggacgccgttcacggcaacctgcattacatcaatgcggcccggaaagtcgtccggacatggcgcggaacggactacaagcccggctccttccagcgcggatggtgcccggcgcaccccacgttctactgcaaaaaggactgcttcacccgctatggcggctttgacccctccatcggcagcgcggcggattttgagctgatgctccgctttattgaaaagaaccgcgtctccacagcctatatcgaccgcaacatggtcttcatgcgcaccggcggttccagcacggcgggattgcgggccatcctgcgcaatacgcgccagaacaggcaggccttcaggaaaaacagccttccgtgcccgtggcactacggcgtcacccggctgctgtccaaggcgggcaccacgggcaatcccgtccgctactttttccaaacccggtaatatcccctttcactgtcccatttgccttccatgaacctgctcttctattttgaccatcccatcctgccccatgcgggcggaacggaacgggcggcgtatcttctggcgcaggccctgtcacggcacggccaccgggtttccttcctgtccctccggggcgcggattcactgcctgcggaaccgccttatttcctccttccccgcacaggcacgctctcctgcgcggaaaacagggagtacgtggaaaccctgtgcgccgggcagcagacggactgcatcatcaactgcggagccaaccaggacgactccttctttttcagccatgagcgcctttccgtccaggcgtccatcgtctcctggatctcctttgacgtccataccgggctggattacttttccgccctgctccggaaggatttcagcacctggggcaacaccgtgaaaacgctgctgcgccgggcgctcctgccgtacaaaaagcatgtggccgtcagcaacaagaggaggaaatacagggacatgttccgcggctcggacaaggtggtgttcctttccccccgctacacggaagacgcccttcaactggcgggcgaaccggaaagggcgcgcctgtacgccatccccaacctgctgacctatgatcccgtgcagcccggcctttccgggaaggaaaacgccgttctttacgtggggaggctggtggattcccccaagaaggcggaccgcctgctgaaggtctggaaaagggtgcagcccctgcatccggactggcgcctgtacctggtcggggacggcccggaacgcggcaacctggaacggctggcggcacggctgaacctggaaaacgtccattttgaaggagtgcaggaccccgcgccctactaccggaaggcccggatactctgcctcacctccacgcacgaaggcatgcccatggtgattaacgaggccctttcctacggctgcacccccatcgccttcaacagcttccacgctgctgaagatatgctgccggaccgggagacggggcggctcattccgcccttcagcctgcgcctcttcgcccgggagctggatgagctgatgagcggcccctacgtgccgcccagcaccagggtattaaccaattatcaaccggaaaaagtgattcccctctggatggaatgcctgcaagaacaaccatgagcaacatcgtcatctatctcccttacgagcctctgggcaagcagggcggcatggagcgcgccacccatggcctggctgaaatgctgcgggacgccggacacagggttctgctgctctgccgtgagaaaaacaggctgggggaaacgtactttgcgcccgttcccctcgccttccttccttccggcctttcccgcagcggagagagggactacctgctgaaactgctgcgggaggaaaagacggacgtgcttattgaccagacggaggggggcgtcacgggccgctggggcatcttccgcacgcgcacccagatggaggaggctcccgtgaagctggtcgccgtgcagcacagctcccaatactccgccctgcgttattaccatcttgtccacaagcgccggggcgccgcctccttctccggaaaatgcagggacttcctgttcaacgcactggcgctccccgtgaagcggctccgggcgcggcggctgcaaaaaagcctgttccgggaactggcggccaattatgaccgcatcgtcactctttcccgcggcggcatggaggaattccggctgctggctcccggcacgcctgcggaaaaactggcggccattcccaaccccgtcccgccgattgaagcgccgcccctgccgcaggaaaaggaacaacgcgtcctcttcgtcggcaggctggacaactccgtcaagggcgtggacagactgctgaggatatgggcgcgcgccggaaaatccctgccggactggcacctggacattgtgggagacggcccggacgccgccgccctgaaagaactagcggaacgcctgcgactttccaacgtttcctttgaaggcttccggaacccggccccctattaccggcgggcctccatcttctgcatgacctccacgtttgagggcttcgggctggttctgccggaagccatgcagcacggctgcgttcccatggccttcaacagctacgccgccgtgcgcgacctcgtcatccccggtgaaaccggcatcctggcccccccctttgacgaggaggaatacgcgcgccagctcctccgcctgatgcaggacgaccccctccgctccgccatggcgcaggcaggcccgcagcatgccgcccttttctccccggcgaacgtcgtgcgggaatggaactccctgcttcagcactaaccgtccacctttcaatgaagattctcttttgtttcatgggcacgctcaatccatcctgcggcggggtggagcgcaccatgtgcaatctgattcatgaattgcaggcccatgggcatgaatgcgccatcgtgagctggtaccggaacaccccctacgagcccttttccgggattcagaaaatcctgcccactccttcctcccggataagggaggagcggcaggcggctttcaggcaggccctggaggaacggcagccggatatcatcattcatgacggggaactgctgggggcgggagccctgttccccggtccggcaggcaggaagcgccttctggaagccttttccgggaaaactcccgccattgtcgacatgcaccactcggacatccgcggccgcctccgcgcgcctttcctgaaaaggatgtattacaacgtcacgtggcgcaggaatttctatctccgcatctcgcaggcggacgccttcgtcgtcctgtcagagtccttcaaacaggacttttacgactttctgccgggagtccggaaggaaaaaatcaccgccatccccaacatgaattcctttgagaacgggagcatcccttccggaaaggccagggaagtcctgttcgtggggaggctggacaatccagtgaagggggtggaccgcctgctgaagatatggagcatggtctgccgccgggaacccggctggttcctgcgcatcgtgggggacggaccggaccgggaatacctggccgcgctggcggaggaatgcggctgcaccaactattcctttgaaggagccacggaccatccggaagaatactaccgcaaagccggaatcctgtgcatgacgtccacctttgagggcttcggcatggtcctgattgaaggcatgcagcacggctgcatcccgatggcctttgaatcctttaccgccgtgcgggacatcattgaaccggaccggaccggaatcctggtccctccctttgacctggagcagtacgccgcccggctcctggacctgatgagggacggagggaagagggaagccatgtccgcggcctgcttccggagcagcgggaaattcggcaaatcccgcatcgccggactgtgggaaaacctgctctccaagctggcggaaaagcccagatgaaccgaaccctttccgtttactcatgaatatctgtttcatcgcctgggaacatttcggcgtggggggagtctcccgcgtcctgacgcgcatcatgaatgcgctgtgccgggagcatgaaatcagcgtgtactgcctgcggcgcccaccgctggaaaacgcgtacgggctggacctggagaacatccgctttttccaccatgaaatgaacgtttacgagaaaatgaggcgttccgtgatggacaggctcgtcacccggactcccctgttctcctcctccgcaggcgcccgcgcgtacgctttcctgcggtacacgcattcctttaaaaagcgcctcaccagccacatcaaccgccaccaatatgacgccgtcgtcttcgggtccggctttgaggactccctgctgctcgccctgctccggccgcggctttccccccgcaccagaatcatctcctggtcccacgcggcctatgaagactacttcgggttcaagggcccccatttctcccgttacttccgccatgcgctcaagcggttctaccaccgcttcgaccaaatcgtcgtcctgtcggaccacgacaggcggaactttgaaacgcgccagcacctggcaacgcggcgcatctacaacccggccagcttcacggcggaacggcattccgcgctgacgtcaaaaacgttcgtcttcgcgggctccctgtcctcccacaagggggcggacctggccctggtggcattcggggaattcagcaggaataacggggaatggaacctgcacgtgtacggagacggccccctgcgcccgtggatggaggaattcatccgggaacacggcctgcaatcccgcgttcgcctgcacggcagccacacagccatggagcgggaataccccaaacacgccattctgctcttcccctcccggtgcgagggcttcggcctcgtgcagattgaggccatgagctgcggcctccccgtcatcgccgcagacatccccatctgccgggaactcatacgggacagcggagcggggcgcctgttccccgccggggacagccgcgccctgtgcggagccatgcactccatggccggggaagacctggcactgtacgcgcggaaggcgcgcgcgcaggaacaatttttcacgctggaacggattatccgcgaatggaacggcatgctcaaggaggtgaacccatgaaaaagcttcttctgctggaacctgtccgcaaaaaggggaaccaccagttcttcatggactggtttgcccgggcgtggcaggcctgtgggggcggcatcaagcgcaggcgcccccttccctggcccgcgctgctggccgtggcccggctgaagctgtccgccaacctgcctccgctttcctcccgccggaacgccctgctggtccccggcgcgggctatccggactccttcgcatggccgcatgcctacacgcatgaaatcatccccatgctgtgggacgtctggccgcggtactggccgcgcctcatctcctccctgaagcgccaccgcgtccgcaccttcctgtgcacctcctcccaggtctgcgaacacgtccggaaggaactgccccgtatccggaccgtccacgttccggaaggcattgacccggcgggctacctgcccggaaaggacctccgggaaaggcccgccgatattctggagctcggcaggcagatgcccttcttccaccgcgccgccgtccgggcctgccgggaacatcccgaatgggttcatctgttccccgccgcggagggtcccctcctgttcccggacttccgctccctctgcgaggggctggcctccgcaaaaatcaccgtctcctacccccgctgcgatacgcacccggccatggccggagaggtggaaaccctgacccagcgctactgggaatgcatgctgtcccgcacgctcccggcaggcagggccccgcaggaactggtcaacctgctggggtacaatcccgtcgttgaaataagcgaacggaacgcccatgaacaaatcacgaaccttttaacgaacatttcctcctatcaggacctggtggataaaaactaccgggcggcctgcgagcacgctccctgggaagcgcggatagcctccctgctcccgcagctggaacgcctgggctaccggataggaacgccttccccgtccgcatgaatttcccctgaacagcatggcatcccttctgcaatacatcaagaaacacggaacctggtcattcctggtaatggcggcgatcgcctccaccatgacgggcgccatctcctttcttgcccccctgtatccggtgatgctggcggtggccgctgcggtgtgcgtgacgaaaatgaagaagaccagcatgcccctggtcatcatggcggcggcatgcgtcctcagcctggcgttcaaccatccgcccgccattttcaagccctggtaccgcctggcctatttccttctcctcctgctggcgcttaccccgctgacttcctcccgcctgttgaacgcgttccgcctgaacctgttcctctggctcatgcgcttctgcgtcttcatcggggccggctccttcatcggctacttcctgggcatcaactacatgcgctacaataccagtgagatgatcaatgtggcgggcctcttcggggggctggtctggcaatccatcacgctgggcctgctcgccgggctggggctggtttatctgaccgtcctccatctggaaaaccgggattccggcaggaaggagaccaaactccgcctgggcctgatggtcgcgtgcctgggctccatcctgctttccgcctcccgctccgccctggtagccaccctgatgggggtggggtacgtcttcttcatgtacttcaggcatgcccccaaaaagcttttccgggcgctgctcgccctgttcttcctgggcattctgctggtgccctttgtccagcacttcggcgccaacacgcttgccaagcagcaggccaacctgagcatggggagcgccatgtcctcccgcacccagttgtgggaagaccgcgcaacggagttcctttcctcccccctgtacggcgtggggttcgcctcacagaaaatcatttcattcaagcaatccctggtgaccggcatcattgaaccgggcacgtcctacggggccgtgttcgccatgacaggactgctggggggaattcccttcctcttcatcctgttcggcaacctgctcaaacgcccgttccgcgcgccgggctctccgcccgtttccccggcgcaggcggccctggccctcttcgccgtccacatgattgcggaagggtacgtctttgcagccggttccggactttccgccgtcttctgggccgtcatcgggggggcccatgcgtaccgcaacctgcccaatggaggaaaataacaccatgcaattcgtcttctggcaaaacatgatcagcatccaccagtcagccctcatcaaggcgctggcccgggagcacggcgtcctgctggcggtccagacggactttgaaggggagagggaatccagcggctggacggtgccggacatggggaacgcccgcatcctcatctccccggacgcccggacggtggaggaaaccctgcgcgcccatcccgcggccgtccacgtcttttccggcatcagcacctacccgatggtttacgcggcgttcaagcaggccgtccgccgcggcctgaaaaccatggtgtacgcggaaccctaccgccgccagggctggcgcggcttgctcaggagcgtcaagtaccgctttctccgcctgcggtacgggaaaaagatcgcggccctgctggcgacggggcggctgggcgtggaatgctaccgccgcgccggattcccggcggactccgtctttgaatggggctatttcacggaatcagccgcatccgcggctggcgcggaaactcccgccatgtctccccccgctcccggggaaaagcccgatctcctgttcgtgggccagctcatcccccggaagaacctcctgcccttcctccgcgcggcccggcaatgccgcggcgccttccgccgctgcctcgtggtgggggacggcccgctgcgggaacaggccgccctggaggcgcagggctgcgcgcagatttccctgctgggcacgcaggggaatgaagaaacgcgccgcctgatgcggcagtgcgacctgctcgtcctgcccagcctgtttgacgggtggggagccgtggtgaatgaggccctccaggccggcatgagggtgctgtgctccacggcgtgcggagccgccagcctgcttgacggccgccagcgcggcggctcctttgacccggaccgtccggaaagcctgcgccgcgccctgcgggaatggctggacaagggccgcctctcccccgcggaacggaacgccatcgccgcgtgggcggaacaaaccatcagcggagccgcggcggcccgctatctggtccatatcgttcattatacggaaggccgggaagaaaaccgccccgcagctccctgggctccactcaaggaaacggcatcatgaagatcctgcacaccatcgcctccatggcctcccagtccgggggaaccacggcctgcacccgcgaactggtgcagaccctgaacgacctcggctgcgctacggacatcctcactgtggaggacaaggccgggaatcccgcggaagaggaaagctccttcatccacgccgtccccaacgacctccgcacccctctgggcatttccatgaatctgcgccgccggctcggggcctggcgggactacgacctttaccacaccaacggcctgtggctggacgtcaaccacgccacctgcgcgcaagcccggaaaacgcgcaagccctgcgtggcctccccccacggcatgctttacccgcaggcgctggccatcaagccgtggaggaaaaagctcatgctggcgctgggccaccgccgggacctggcgcaggcggactgccttcacgccacctgccgggaggaagcgcggcacctgcgcgaactgggctttgccaaccccgtggcggtcatccccaatccggtggccgtgccttcatggattgaccagatccggcggagagagggagagcgtttccgcgccgggttcctgggccgtttccaccccattaaaaatctggaaagcctcatccgggcctggggcagcctcaacctccgggacgcggagctccttctcatcggggacggcccggaggactacgcagcgcagttgaaacggctggcggcggaagtgggcggccccggcatccgctttacgggcttcgccgcggggagggagaaatacgaactgctcgcctcgctcaacgtcctctgcgctcccagccatcaggaaaacttcggcatgagcattgcggaagggctgctggcgggaacgcccgtcatcgccagtaaaggaacgccgtgggaggagctggatacccgccgatgcggctggtggcgggacaacagccccgccgccctggccgccgcgctggaagaagccttcaacctcacgccggaggaaagccgcgccatgggggaccgcgggcgcagcctcatcatggaaacctacgcctcgccccaggtggccgccagcatgaaacgcctgtaccgttacctgctggggcaggaacccaaaccggaattcgtcgacctttcatgaacctcctctttctgcttgggaaattcccctccataggcggcgtggaaaccgtcaccgccattctggcgaatgaattctccgcacggggccatgaggtgcatgtggtctcctttgaacaagtgacggagacgccctcccccgcgctggacagccgcgtcaccctgcaccggctgggctatcctgtctccagccaggccaatctcgccgccctccgggacctcctctcctcccgccgcattgacatcgtcatcaaccagtggtgcctgcccttccacgtcacccggctgtgccggaaggccatgcggggcctctcctgccgcctgctggccgtgcaccacaacgccccggactgcaacgcgcggctggaaggcctcagaatgcgcatggcccgggcggggaatccggtaaacagggccttcctgcgcctcctgctgaaaggctgcgccatggctaccggggccagcctgcgctacgtttatgcccatagcgaccgttacatcctcctttccgacagcttccaccgggccttccggaacatcaccggactgaagaataccgggaaactcctgacgattcccaaccccgtcaccgtggaaaaccgggaattccgctatgatccggccttcaagaagaaggagcttctttttgtggggcggctggaacccaaccagaagagagtctcccgcgtgctggaaacgtgggccctgctggaaccccgcttcccggactggaccctccgcctggtgggggacggcccggaaaaggaggcccttcaggcattctgcgcggagcgccgcctggaacgtgtctcctttgagggcttccggaacccggccccgtattacgaacaggcctccctgctccttctggcctcggaatacgagggactgccgctcgtcgtggtggagggcatgtccttcggcgccgtgcctcttctctatggaagcttctcttccgcgtatgacctggtggaccacgggcagaacggctgcatcctgccggcgtccggcgggttccaggcgcggcagatggctgacatggccgccgggctgatgcagtcccccgccgccctgcacgccatggcgcgggaagccgccgccaaaagccggaaattcacgcgggaacacgtcgtccgccagtgggaggaagtcttccgcaataatacgcccaccccctagcagaacttcattcagccacctcatggaacagacacggaaaaacacggacacagcgttcaccatcagcggcaggctcctggcttcctgcgccgtggcctatatggctctgcccaccatcctcttcctgctgggctgggtcaggcccctgttctccgttccggcggccatggccgtggcggcggcttccgtcctgctgtgcgtgaagctcccggtccccacgcttcacttcaccaggcggcagctggccgtttacctctgcgcccttcttctttccctcctgtggctgctggcgggaggaataacgggggtggccctccagcacgcggacttcgtggtccgcaaccccatttacgaaacactcatccggtgcgactggccgctggcggaagcggacggcaggcacttcatctactacctcgccttctggctgcctccggccctgatatgcaaatgcttctcctggtcggacgtcttcatcgtcaactatgtcctgaccgcctggattgaactgggcctggcgctggcgctcacggtcctctggggcaaattccgcatggccaccctgctcttcctggtcctgctcatcttccagggcccgctggacggcgtggtcagatggagcgttcatttattcaacccgcaggggcagacggcccatgaactttacctgacggtgctggccttcttcggcggcgtggcccccaccatgcagctccattacacctttcaccacaccacgctgctgtggctgttcctcgccatggcggttgcctgggacataccgccccggcaccagctcttcctggcctccctgtgcctgctggcctcccccatcggttcgctgggcctgctggtcttcattgccgtccgcgcgctggtccgccgcattcccgccaggcagtacttctcctcctggacggtgctggcgggcggcgcgctcgtcctgctggccggaatctacttcacgagcagcaacgggaacaaccgcatccgcctgacctgggaggactccccctttgacctgctccggcacggcggctggaaattctggggcgcgctggccgggtcctggctgctgacggtcggcgctccggcggtcctcctgttccgccggtttaaaaaagacgacctcttctggaccgcgctggccgttctgaccctcacctacttcatttacataggttccgtgggcggctacaatgagttctgctacaaggcctcaagcgtcagcttcttctgcctggccctccttttcacccgcatctttgcggagccggtgggcacccgcccgtggcgcgcatggtgcgtctgctatctggcgctggcggccctgcccagcctctccgtcttcgccaaggccgcgcccacgctcgccttcacggaatccgcgcgacttgccaacatgcagcgtctgtgggagggccacctccaccacccggagcatccctggaacgccccgctatggggcagcggagagggagccgccttccgggccgcctatttccagaaagcaggggaatccgcggacggccccctgcgccccttctccaccggaatgagaacagacgcggaaccttccgccgctccggcctcccggccctgaacgcctttcaccattcaaacgacatcctcccgccatgaacctgtcccgttaccaggaacactactccctcagccaccgcctcaaacggtacggctggtacgtcatcaaccggaccctcttccggatgatggccaccaacgccatgaaggtgccccggaatctgctgctgcgcctgttcggggcaaaaataccgctcgtctccctcgtgtaccccagcagcaggatatgggcgccgtggaacctctccatgggggaatacgcctgcatcggcccggatacggaaatctacaacaaggcccccatctccatcggcagccacgccgtcatctcccagggaaccttcctctgcacggcctctcatgacatttcagaccccggccacgccctcgtcaccgcccccatcaccgtggaagaccgggcctgggtggcggcgcaggccttcgtgggcatgggggtgacaataggcacgggagccgtggtaggagcccgcagcaccgtcttcagggacgtggccccctggacggtagtgggagggaatccggccaagttcatcaaacaacgcacgctccgctgaaccatgctcgacctttccgtcatcatccttgccaagaatgaggaacttcacatccgccgctgcctggagaacatccttccggcggccaaagaagttttcgtcatcgactgcttttccacggacaacaccgccgccatctgccgggaatacccccgcgtgcaggtcctccagcacgaatggcccggcctctacgccccgcaattcaactgggcgctggaccactgccccatcaccaccgcctgggttctgcgcctggacgcggacgagtggttcatgccggaagccctggaggagctgaaggaaaaattgcccgcccttcccccggacgtcaccggagtcatccacaagcgcaggcacatcttcctgggccggtggatgaagcacggcgtttacccggtcaagctgctgcgcctgttccggcacggagcggccagatgcgaacagcgccatatggacgagcacatggagctcagccgcgggcgcgccgtggaattcgagcacgacttcgtggacgagaacctgaacggactgggctggtgggcgcacaagcacgtggactactccgcccgggagctggctgacctggaagacattctttcctccgctgcggcggactccggcatcaacgggcaggcggaaaggaagcgcgccatgaaggaacgctacgcccggcagcctctcttctggcgctccttcgcctacttctgctaccgctacttcctcaagctgggttttctggacggacgggaaggatttttgtggcatttcatgcagggctggtggtacagaaccctcgtggacgcccggcaatttgagaaacagaaaaaaggctccggcaagacggcgcgctgacccccatttcttcccgcttttccatgaatcccttcttttccatcatcattcccgtttaccgttccggcccctttctccgggattgcctggattccgtcaggaaccaggccatgacggactgggaatgcatctgcatcaatgacggctctccggacgggagcggcgccattctggacgaatacgcccggaaggacgcgcgcttcactgccatccaccaggaaaaccgcggcgtgagcgccgcccgcaacgcgggcctttcccgggcgcggggaacctggaccgccttcgtggacggggacgactccgtggagccggacatgctggcctgccttcatgacgccgccctccgcacgccggaagccgcgctccactgctacggaatcagcaaggacttccacacgggctgccgccttacccgcacggaaaccgcgctgcccagccgggaccagtacattcccgcggaagaaacgggcgccttcctgcgctacctgctgaccagcttggacatggaatcctcctgcaacaaactgttccgcacggagcttctggaaaaaaacggcatccgcttcaacgcctccgcggtggtgtttgaggacttccagttcgtcctggactacctctccgcctgcgctccgggcatcagcctggtgaaaagggccttctaccactaccgggtgcgggaggaggaaaacggcgcggccaagcgcagccgcttcaacctcgtgcaggacatagacatgctggcagccaaattcctggcgtggacggacacgctggccctcccgcaggaagacgttcccgtggtcaaaggctacatcctgcaaaaaatcaacgtgatcttccacgccctccagcagcagccctacgccgcccgcaaggcggtgttccgggacttcctctccagcggactggccgcgcgcggagctgacctgcgcctgtgcggcccctacttccacctggtctgccgcctgctggccgcacgcaggtaccgcatggcccatctcctgctgaaaacaaggcatctttaacgcctcatgcgccactcaaccgtttttttccgccgcccattttccagccatgcaagcagccattgacagcgccattcccccgcccgcagccgcgctcggcaggggccggattccgcaagtggactacctcaagggaattctcatcaccctgatggtccttttccacctgtcctggttctccacgcactacctggacgtcacgcggtacgtgtacgtcttccacatgtccggcttcatcatcctttccggcttcttcgccaataccggcaagactccgggccagttcctgaaaacgtggctgggcattctggcgccgtacctggtctttgaatcgctgtactacctggccctgtcccatctgcccgcctccgttcccgccagcaaccggctggacccggcgttccccgccttctggaaggcgctgctgctggcccccgccggaacgtactggtacctctacctgctggccgtatgcctgcccgtttactatgccgtctcccgcattccgcgcctgtcccctccggcccggctggccgtatgcgccgccctcctggccgccgtctcctggttcaatccggcgttccaaatgattcacgccgcttactttctcctgggggctttcttccggatgaccgggctccccatcctgaaatgcttcttccccaccctgtgggcggctgtccccgccgccgcgctctgcctccttttccccctcccctcccgggacagcatgctggggctctgcctctgcatgctcacgctcagctttctggtaaaaacctgcgattccgcaggcagggccatccgggaactgttcgcctacctgggcaggaattccctgtccatcgtcatcttttcccccgccttcacgctcctgtgcaagccgctggtcccggtgctggcctttgattccagcagaatctgctttgccgccctgtccgtggcgctggtgctggcggcctgcctgggagtcaccagattatgcgatgccctgggctggagcaggttcctgttcctcaaaaagaagatgtactcccccctcgccctttccgttgaacccgccgcccccctgactttcccttcatgaccccggacgcgtacacccccctgttcagcatcatcatcccggtgtaccggaatgaaaagcagcttgcggcctgcctggactccgtcaggaaccagaccctggcggactgggaatgcctctgcattgacgacggctctacggacggcagcggcgcgattctggatgaatacgcccggaaggacgcgcgcttccgcgtcatccacaagcggaatgaaggggtgtccgcggcgcgcaacctggggataagcctggcgcatgccccgcatctggcgtttgtggacgcggacgaccggctcctcccggaaacgctccaggcctgccatgaaacgatgcgggagaccgcagcggacatggtcgtcttcggcgcaagcctcgtttcctgcgcggcggaatggacgggcttcatgtccccttccatccgctccctgcctccggattccacggctgttttccacgcgggaacaccgtttgtggaaaacaacaacattccggcctgctgggccaagatatataaaaaggaaattctggttaaaaataaaattaaattcccggaaaacgtcaaatttgcggaagatctttatttcacggctcaatgtttctgccattgcagctccgtaaccgtcatcaacaagcctttttatcaatattccgccgacggggaaacaggggttaccagcaatttcttcaaccggaaaaggcctctggaggattacatgaacgcccttcgcgccatcctggacttgagcaactgcattgacgggcgttccccgtacagcagcaactatttccagcggagccggagcctcctggtcctgttcaggctttgctatgccaactataaacttcttgcggatagaataaaaagcctttaccccgaccgggaaaaggccatacggaaagaagctttttccgccttaaaaaaatatgtgacgcttgccaacctgccgcggatactttacttttccctcaaatcaaattacgggcacctgctcgggaacctgctggccaacaagaaataaattccacatgaatgaaatcaagacgggggcctgcattaattacatatccatcatcgtcaggctggcgacgcagttctttctgaccccgtttaccctgtccagtctgggagaaaatgaatacggcattttcatgctcagcaattccgtgattgcgtggctgtccctgacggacttcggcctgggggtgaccgtcaacaaatacatcgccacctatcacgcgaaaaaggagaacgaccgggaggcccatttcctgggacaggccatgatgctgttctccttcctggggctgctcaccttcgcggcgggcatgatctgctatgtaaacctgggcgccctgttccccaatctgtccgggccggagcttgacaccctgaaaatcctgtacctgctgacgctgggcaacatcatcctggcctttcccctgcggccgctgtcctgcgtgcctgggtcctacatgaaattcatcgttcccgggctggtcagcctgggcctctccctcttcaatacgcttcttactgttctgcttctggtgtgggggtacaaggcgatcgccctcaccgtcctgggcgtgggcatcggcgtagccagcctggcgtggggaacgtattacaccatccgctgcctgggcgtgcgcatcattttccgcaagcctgactggaagctgtaccgggagatgttcaccttttccttctggattctgctgaaccagctcatggacctgttctactggcgggcgggcactcccatcctggcaaggacggcgggggcccaggcggtcaccctgttcacgctgggaatctcgttctcccagtacttcatgacggcttccaccgccatttccggagtcattgcccccaaaatcatgcagatggtggccctggattccaccaaggagcagctcacccgcatgatgatacgggtggggcgccttcaactggccctgctgagcgtcatcctggtttccttcatcagctgcggccacgacttcctgcacctgtgggtggggaaaaccatcggggaccagacaggcacggtctgggtgggggccgtcatcgtgctgctccccctgctggttccgctgactcaaaacacgggcctcgccatcctccaggccctcaacatccacaaggggagggccatcatcctcttttactcctccctgctctgcgtcatcctgggctacttcatctccctgtactacggcaccatcggaatgttcatcggcaccgccatttccctgttcatcggccaggtgctgatgatcaaccgctactacgcccgcaccgccggtctggacatgaggcgcttcttccgccgcacctacgggcccctgctgctgccctccgccgtcatgatcctggcggggctgggagcggttgccctgctaacgctggacaactggttctccttcctggccttcgccttctgctacggcctcctggccgtgggaaccatctggttcttctacctcaaccgggatgaacgggacatgtttctcggccccctgcaaaaactgattccttcccgccatgataaaaactgacgccccgcctgagctctccaccctgtgcacgggctgctccgcctgcgccaacatctgccccagggacgctatttccatgaactggagcccctccggcttcttaacgcccgcggttaatctggaagcgtgcgtccactgcggcctctgcaccaaaacctgcccggacctgaatccgcccgcacggcccccccaggcgtttgacgagcccagggcatacgcggcctgggcgctggacgaggccgtgcgcctgaactcctccagcggaggcgtattcaccatcctggcccggcatattcttgcacagggaggcgtggtctacggcgtggcgtggaacacggacggggaactttccgtccgccatgtgcgcctggactccctgccggagctcaagctcctgaacggcagcaaataccttcaggcggaccccggccacgcctaccgggacatcaagaaggacctgaaagagggaaaaacggtcctgttttccggcacgccctgccaggcggcggccctgagagcctatctgaaaaagccctgggacagcctcttcatcattgacatcgcctgccacggcgtaccctccaaaaacctttttgacgcgtaccgacaggattacgaacggagcacggaccggcagataagctgcatcaacttccgggacaaaacccacggatggaaccactactccgtgatgaaatcccaccgggacggctccggttccggcgcgcgcatttatacggaagaccttttcatgcaggcgtacctgtcagacatctgcctgggggaagcatgctacaactgcccgcatgcttccggcccccgcaccagtgacctgaccctggccgacttctggggcgcgggatacttccatcccaagtgggatgactccaggggaatctccctggttctggcaaacacctcccgcggggaagaacttttaaaccaatgcgggaaggagctctttctgcaccgggagaactggcaggccgtcaaacacaccaacaggggcatccggcggcagcctgccttcccctcccggctggcgcgccggaacttcctccgggacctccggcagaaacccttcacggaagcggtggcgcagcacacggcccgcttcaaaccccgggcggaggtgggcctgctgggcgtctggatgacgtgcaactatggagccgtgctcacctccttcgccctttaccggctgctggagcaaatgggaaaaagcgtttccctgattgatttttccttcacggagcggcagaaagaccctgcgacggtattcagaaaattcctggtccgggagcgcatttccacaacgccgctgcactccctggactacgcctaccacttaaacgaccagtttgacacgttcatggtaggctccgaccaggtgtggaaccagggtttcatggggcacttcttcttcctggacttcgccaggggggagaaacggaaaatcgcctacgggccgtccatggggcagttgacggaaccttccgggaaatatcttaaaaaaacggccatgctgctcaaacggttcgatgccgtttccgtccgggaaaaaccgatggtggagcacctcaagcggcactatgggcgtgaaagcgcctgggtgatggaccccgtcttcctgctgggtagggaacgctgggaggagctggcacggcaggcgcctccggcggccaaaggccgcatcgtctcctacatcctggacccggcggcggaaaaaaggaagctcctgctggacgcctcctccaaactcgggctccccctgctgaacatggtggacatccagaaaaaggaggtggacaacctcggcaggctgaacctgcccaataccatgaaggaagccacgttatatgaatggctcggcaacatcctccactgcgagtttttcattacggactccttccacggcgtctgcttcgccctgatcttcaacaagccgttcttgtgcatcaacaatcccatgcgcggctccgggcgcttccactccctgctgaaccttctccggcttcaggaccgcatgctgcccgaagacgcggaagccctgccggagaacgtcccgctcacgatggactacgctcccgtcaatgaactgctggaacagaaaatctcgcaatcccgggaatggcttcagcaggcgttctccggggaaagggatgccaccctggaagaatacagccgcctgacggagaaaaaactgaccaggagaccgccgtcccggtgggggcggctcaggaaaaaaggaagaaaactcctggcacgggcgtaccaccgcatccgcagatcatgacgcccggacggttccctaccttccgcccttcattaacttcaaccctctgccaactcaatatccggctcatgccgcagaaaaactcccttcccatggaaatccctaaaaaacgtgtcgcatggattgacgtgtcgcgggtgcttgcagcgctcctgatcatgtacgtgcacctgtcctcccccttgctcaagacaacgggcatccacctcttctacaacggcagggttcccttcttcctggtgctggccggctactttctggcaagaaacatcacctggaacaaggcagttgaccgggctttatggctgttcatcccgtacatgatctggaacgtgctgtacctgttccttctctccttccctgccggcagctccttccagcttgcggacctggccggcatccgggacgtcttcctgccgggcatggacctcttctcctttgggagcgagtcccccgacgttccccccatcggcccctcctggtttctgcgggacatcatcattcttaccctgctgacgccgctgctggcccgcattaaaatactgctgctgcccgcgctgctcctctttttctccttctgcaacatggctcccgatcccctggtgacgctctccgtggggtcctgcgccttctacctgctgggcgtcgtgctcagttcccgccggattgacgacatccatctggtgctgaacaaaaaattcggcgtcgtcttctgcgtgagcattctcgtttcctccgcgatggttctgctgcactccgccggaatcctttccctgtggacggaaacggtcgcgggcatgctgctgggagtcatgctgattatgtacgcaggcatctggatggaaaagcgtctgcccggcgttgccgccagaatagccctgctggctcccgcctgttttctgaccttcatgctgcacctgcccatttacgaatgccttccttactccatgaaatttggtgccttctccctgttcaccccgctgctggcattcacggctattgtgctgttctattttgccttgaaacgtttcacccctttcctgctgccgtatctggcccatgttaaacggccgtcaggaaagccgtcggcttaaagggcaaagacccattaaagacatccgccccgtccaccgggaaaggatacccggtcacagccggagaaatgccgcccaagccacatgggggaagcttccgccagtttctgcctgggataaaacacattccttacgcagaaaaagaatgtgccctcatcccttcggctgcatgcatctccatgaattgatgagctgtccgtccatgtccctccgggaccgccttgttatcttccatggccgcctgtcccggatgcattcgccaagttccggcccctgcaaatgcggcagggcagaatttaagaaagggcaaggaaactttaattcaaacaataagattccggagaatggagaatgtccctaacggaatcaacaaggattacgggccgcggcaagaacgccgccgatgattttttattcatttctgaccaatggatgaagtatccagaaaagaaaggaaggcatatgcctccctccaaaaattacccggctctccggggaatccacaacactcattgatggcaaccaccctttattgtgttcaacaaggacattcattgagcgattatcaatcatactccgctcaaaatctttgattcatcattacaatgagcaaagtaccccacatggaagaacctcttgtggatattctggagctggggcgttggatggctgaaaatcatatcagccgctccacgctggcttcggccattggcatgaacagaagcgccatcgacaactactttgtcagaaaaaagctctcccggcatgcccaaatcctcatcaagcggttcatggacggccaggaagccctggccgcctccaatgaggtatcttccctcatcacggttcccctgaaaaaccggatcatcaatcttgccatgaaagccgccgtccggaaaaacctcacgctggaggaattcatggcgcgggccgtggagggagccgcgaagaacgttgaggaagaaaaataaaatcatgaagcgtttgcaggcaatggcggcagtcccggcgtaagatcccagcagcatcaccttttccttggcatttctcatggcagccccggcccattccagaaatcacggcattgaccttctccggtgcctgtccatgttcttcgtcgtccttcttcatgtgctcaaatggggggagggcggcaacctggacaacagcttcctcggaacgcccaattacgccgtctcctggtatcttgaactcagcgcctactgcgccgtcaactgctttgcccttatcacaggctacgtgggcgtcaatgtgccgtaccggatttcccgttttatcaacttatggtttcaggtcttcttttacaccgctggaataacctttttatttaaatggctcgtgccgggcagtgtaagctttaagggaatgatccaggcattctttcccgtgctgcgcctggcctactggtactttacggcttatgccgtcctgttctgctttattcccttccttaatccggccatccgttccctcagcagggaatccgccaggtggctctgcctgctggtcctgattgtcttctccctcttttccaccatatccggctacgggaactggctcagccagggcggctacagcgccatctggctggtctgcctgtacgtcgtcggcggctgcctggggcacttccagctctggagcacgttaaagcggcccgcgctttactacgtcctgtgctgcatcctccccaccgccggagtaatcgcgttggggtatcttcccctcaatccgggcattgcggaaaaactctttgtctcttatacggcgccgttctgctgcctgtcctccttcttcctgctcatggcctgcgcgcgcatgcgcatcagcagcggaaccgccatccgcctcatttccttcttcgccccgctttcctttgccgtttacctcatccataacaatcccctcatctggcaaaacatcatcaaggcgcggtttgcggaattgcaggcctgcccctggtacttcacggccgccggggcgctgggagccagcctgggcatctacctcgcctgctccctgatcgactacgtgcggagcggcctgttccggctgctgcacatccgcgaactgtcccttaaattggaaggaaccctgttaaaattgaaggaatggattctccggctcattccattataacttccccctgtaatttaactgaaaattctttcagatttataaagattgtcttgcggaattgaacggcgccattactatgtcggcaaaccatgcaatatacaactattaccgctgcggcatgcacggcggccttcgctctctcaggaatggcttccgccgatattcaagttcccctccgggtgctgaattccacttatgacgcgtcccgtccgttttccgccctgctgggaacgggctacgctaccaagtacgtcagccgcggactggctttccagcagtccggcagcgaccatgtggttcccgtggaagccataggcgcttacgacctcaacaaaaaatactccatcctggccggcgtgaaatatcagtggctgacccagaatgacctgacgcacaacagcacgggcatttccgacgaggcaacggccctgctgggcgtcagccgcaaattcagcgactatacgatggcctccctgggctaccagttcgtcaacggcggcctgccgggcctgatgaacgtccatctgggccagacctccagcgacttcccggcgtttgaacacagccgttccgaagaacacagctttgtactggacatccaccacgacttcgggaaaggactggaaaacttcttctgggactgccgcgtgcaatacaccttccgctggatgtccggctggtggttcaccaacacgctgggctacaaatatgacttcaacccgtcttcctccctgattgtagcgggaacctggaacgcctccgccggctactttgacagggactccctcaacgccaacggaacccagggcatttccgtgaccgtggccgtgcccttcaaggcggtggaccgcctggtcctcacccccttcgtcagtaccgtctggctgggcaacggaggcatggcgggcaactaccgcggtccttccgaccgcttcccctccagaatccccgccagaatttaccgcaacttcacgttcgtggcggggctggggctcacctactccttctaagcctccttcaatccctactcccgcggctcccggcacttccccgcatgcgccgggagcctcttccttccccgctcatgcctctgtccgccgttttccatactgattccctccaggaacaggttgccgccctgggcgacgccttcgccatcgccggagaattcctccattgcgacaccatcaacagcggccatatcaacatgaccttccgggccacctaccggaaaatggacggcaccacggaccgctacatcttccagcgcgtgaatgacgccgttttcccgtgccccagggacgtcatgcacaacgtggaaaaggtaaccaaccacatccgctggaagatgctccgggtgctgaaaacgcccttccgccagacgctgaacctgtactccgcccgtggaggccgcaagtacctggaaatccccggttccggcttctggcgctgctacaactgcattgaaagcacccacacgtttgacgtggcggaacatccgcgccaggcgtatgaggccgcccgcgccttcggcgccttccagcagctcctgtgcgacatgaacccggaggacatccatgaaaccatcccgttcttccaccacacccgcaagcgctttgaccggttgcagaaagcggccgccagggactcccgcgggcgtttggactcctgccggaaggagctggacttcatccgccgccgcgaacggtacgtggacgtgctgctggaccttcaggaacggggggaactccccgtcagaatcgtccacaacgacaccaagatcaacaacgtgatgctggacagggaaacggacaaggccgtctgcgtcattgacctggacaccgtcatgcccggcagcatcctgtacgacttcggggacatggtgcgcaccatgacctctcctgcggcggaagatgaggaagacctggacaaaacctacctgcgcatgcccatgtttgaagccgtcgtcaagggctacctggacgccgtcaaagacttcatcacaccgcaggaaatctccaaactcgccttttccgggctgctcatcacgctggaaaccggcatccgcttcctgacggactacctggaaggggacgtctactttaaaacggaaagggagcgccacaacctgcaccgggcgcgcacccagctcaagctggtggaaagcatggaacagcagatgcctgaaatggaagaatgcatccgtaaatgctttcatgccgttaacggctgagggagaatcatccgcgctccttcaacttttatggtagtaccggaacgcgggaaggtgctatactgcggaccatgttaaaaaacatctctcccctcatcagcccttccctgctgaaaattcttgcggaaatggggcatggcgatgaaatcgtcttttccgacgcccactttcccggccacaccttcaaccccacggtgctgagggcggacggactgggggcggacgccctgctgggcgccgtcatccccctctttgaactggacgcctacgccacgcccgtcatcatgatggccccggtgccgggagactccctggacccggcggtggaggccaaataccgcaaggcgctgaactatgacggggacattgaacaaatggagcgctacgccttctatgaacgcgccaaaaaggcctatgccgtcgtcattaccggtgaaaccgccaaatacggcaacatcatcctgaaaaagggcgttaccccgctttcctgacctttgcccgcgcagacagaccattccatgcagtacgactttgacgaaataatcgaccgccgcggcaccggcgccctgaaatatgaagccctgctgccccgctggggccgggatgacctgatccccctgtgggtggcggacatggacttcaaaacgccccccttcatcatggaggccatccgccgccgctgcgaacatgaaatactgggctataccgtcaagccccgcgccttctttgacgccatccggaactgggtgggccgccgccacggctgggaggtgcgcgcctcggaaatcggctttgccccgggcattgttcccggcatttccagcgccatccagtgcttcacggaaccgggggataaaatcatgatccagcctccggtgtaccatccctttgccatgattatccgggaaaacggacgggaaatcgtgaacaaccccctccttctggaaaatgggcgctaccgcatggacgttgaccacatgcgggaggccgtgcgcggctgccgcatgttcatcctgtgcaacccccacaaccccggcggccgcgtgtggagcccggaggaactgcgccgcgtggcggaaatctgcgcggaaagcggcacgctggtcgtctctgacgaaatccatgcggacctggcccttcctggccacaggcacaccgtattcgccaccgtctccgaacaggcgcgcatgaactccgtcacgtacatggcgcccagcaaggccttcaacgtgcccggactgggaagctcctacctgatctgccagaatccggccctcttcgggaaataccagagcttcgtcagcggcagggaactggcggaaggccatgtctttgcctacgaagggttcatcagcgcctactccggcccggaaggggaggaatggctcaagcaggcactggactacatccaggaaaacatccgctacattgaccgggaactgcgccgccgcatgcctaaaatcaaggccatgcttccggacgcctcctacctggttttcctggactgccgggaactgaacctgcctcagaaggaactggcggaattctttgtggacggagcgcgcctggccctgaatgacggatccatcttcggcaaggaaggggaaggcttcatgcgcctgaacgcgggctgcccgcgctccatcctggaacgggcgctcaaccagctggaagcggcttataagaaccgtggcttccatcagcatcaggcataggatcaaaacattttttgttttcctgcggtgcatgtttcctgcctggaaacaggtactgatgaactttgccgtagctcgccggttctcctgccccggagcgttcctctctccttgaaatatttcctcctgaagtcttcccggaaagcagcaagatcattttccaccacaggaggaatggaccctcaccccggagccgccctgttaaaaagaaagggggagggaatccatggataccctgtggaggaataaacgccgggatgataaaaaacggttcttccgtgcgctaagaaataaaagggaaaaacaggaatcaccgtgcctggaactctattgaaagccggtattatctcttttaaaaataatttgaggagcaaaacgctgcgctatccttttcaggtggcatgtattgcatgggttttacttccaaaattatctgttgctgaatgaagaaagggggtgttattgattatttcttcataatgaaattacctattcattttatgatgaacgcatcaccccatcaaacacctgccgcagcatgttccgtgttgcaagaagggccgggaacgggaacgcctctccgaattccatcctgcaagaacatgtgcaatgagggacgccctcccggttccggaaacattatctacaataacgtcccagtcctttcccaaccggggaggaccatcacgatcagccatccccaatggaacgacgaattccggatcacccatagccgcggatgccggcttcaccgcaaggaccacgcgaccgtactctaccacgatggagaaaaactggtactgaaatgggatgattggggaaaggaacggtttatccggcgttccgccgatatttatcattttaccttctacgagtgcacggattccatcaccccagaaaacgtaaatgcagaagaacttattatcaacccattcgaccgtccgggaaaacactttctcttaacggatgaccacagaccgaccataaacatccgttacctgcaatgggacatgcttcttcattttcaggaaatgtatcaggatgtgtctgagcgtatcaggcagatgccatgcctgaaatcagtccttcttgcgggattgtgtaaagattgcctggcagccgtgtatttggcctttcgcttatctaaaaaattccctgagctatcatttggagtatggggatgcccttgggtggcgaatcgcaaaacagccgaccttagaaaagggccgttatggtcctgggaaaacatagaaacgtgcaacctgccgccttatagcagcgttctgttgcgatggggcgatcctgcggatattttcgaggaaatcagccgcttgtcattgaaagttcgcggatttgcattttatggaagttcgccgaactggaaccacgacagggaatgtacggaaagacttaattcatatctttgcaaacactacatctatgaaccgtcatctccggaatcctgccaagggctgcatacgatcattatccctatcatacgccaaaatgcagccctctatcatcacatgatcaacgacatgttttctataatcaacaagactgaccttccagaaaaatgtgagaaggaggcgcttaccctgtaaaacaccacggacattcaggctcattgggcttccggctacgttccatggggaaaatgcagccattccctgggtggccaactagtgcggaagaatcgtcatccgcttcatccagacctccagctgcatctggtcaatgccattcaagcgctcatgaatgcgtcgccgggaaaagcgccaagacgcagaatcttcatgggacgcgttccacgctgtccggaatgcaggatgtcaagaaagaaagaggccgccggactccatggaaaggaacttccgtgcgccttcttccttcattgcaactccttattctaccattccatgcttttaaaaatactcgctggacgccgccatgactttgcttgcaaaacggaaggaaaggagtatcgttccccgcatgtactatatcaccacggccattgactacaccaacggaccgccccacatcgggcacgcctatgaaaaagtccttgcggacgttctcgcgcgctggcaccggatgaagggggaggaagtctatttcctgaccggggtggaccagcatgggcaaaaagtacagcagacggcggaaaaactgggcattacgccgcaggagcatgtggacaacatcacagccaaattcctggccctgtgggaacgcctgggcatcagcaatgacgggtgggcctccaccacggacccgcgccacaaggcctgcgtgcagaaaatcctgacgaacctgaaggacaggggacagctttacaaaaaatcctacaagggattctactccgtgcgccaggaacaattcctgacggacaaggagagggacgcggaaggcagcttcggcccggaatggggggaagtggtggaactggaggaagaaaactggtacttccgcctgaccgaccatgtggagtggatgaagaagttcgtggaaaagagcagcggcttcgttcttccggccttccgcaaggcggaggtgctcaatgccattgactttgactcggacctctgcatttcccgccccaagagccgcctttcctggggaatagaacttccgtttgacccggaattcgtgacttacgtctggtttgacgctctcatcaactacgtctccttcgccggttacctggcggaaccggacagcgggctgccggaattctccaagctctggcccgcggactgcgaagtgatcggcaaggacatcctggtgcccgcccacggcgtgtactggcccgccatgctgcatgccatgggcttctccgacgaggaaatgcccaccctgctcgtccacggctggtggaacatcaacggggaaaaaatgtccaaatccatcggcaacgtggtggaccccaacctgctggcggaacagttcggcccggaacccgtgcgctattacctggtgcgagacatcaccaccggaaaggacgccaactttgacgcggaccgcctggtcatgctgtacaacacggagctggccaatgacctcggcaacctgtgcaaccgttccatcaacatgacgcgccgctactgcgattccgtcatctccgatgcggaggaatacgatgacgaagcctccaaggccctgcgcgtcaccatggaccaggccgtcaccctgttctccaaatacatggacgacaacatggtctccgacgccctggcggccctgaacgcccaggtttccgcctgcaacgcgtacattgaacagcagcagccctggcagcttgccaaggatgaggccgccgcgccgcgcctccgctgcgtgctgcgccacctgctggaatgctgcgcccagacgggctacctcatcggctgcgtcctgccggacgcttccgcccgcatcctggaccagctcaacgccgcggacctgttccggggccgcacgccggatacgctggcctggggaatcctcccctccgggcaccgcatcaataacccggcccccgtcttcccccgcattctctcggaagaggaaaaggccaaactggctgaaaaagcggccaggacggccaaaaaacaaggctgattcccgtgagtgcctccgcatccttcgtcaaatccctgctggcccagtgctgcctgggcggcatctgtgaatgggtggtctgccccggcgcgcgcaacatggcgctgctccaggtgctggccgccgcggaggacctggtgaaatggacccactttgacgaacggtccgccgcgttctttgccctgggacgcattcaggacatggggcttcccgtagccgtggtcaccacgtccggcacggcggcggcggaactgctccccgccgtggtggaggcttactaccagcgccggcccctgctcctgctcaccgcggaccgcccggcggactaccgcggctccgccgctccgcaggccatcgaacaggcggacctgttcggcatttacgcgcccacgattgatctggaaacgccggacagcctgccggaagacattctggaagactgggattacgcctctcccctgcacatcaacgtctgcctgccggacccggaccccgcctggaatcccggcaactgcgacctttacccggcggaaccgccggaagacagcgaattccgcggttccctggcggaactggcccaagccctgcgcttcaaatcgcgcggcgggctggtggtcatgctcggcggactggaccccacggagcaggcccctgccctgtggctcgcgaatgaactgaaagcccccgtggtggcggacgccacctccggcctccgggaggaactggcccatctggccctgacggatgcggacgccctgctgagggaaaacccgcccgccatcctgctcagaataggggacgtgcccgtggcccgcttctggcgcgacctggaggacatcccttccacggaagtcttctccgtcacccgcaccggattctccgggctggcccggccctccgccgtcgtcaccggagacctagaagccattctgcacgctctgggcgacgtggaccccgtgggggacgtcaacggcctgcgcgccatgaacaagcgcagaaaggccctgatggaggaactgctcatcacctgcccggacagcgagcaggccatggtgcgcgccttctcctgctttgccgcggacggcgactgcatttacctgggcaactccatgcccgtgcggtactggaacagcttcgcccagatggccgtccccacggaaaacgtccgcgccaaccgcggggccaacggcattgacgggcaaatctccggctttctgggggtctccgcccggtgttcccgttcctgggccctcgtgggggacctgaccgccatgtacgattccaacgccctggccctccttccccagctggacacgggaacccgcgtgctcggcgtcatcaacaacggcgggggcggcatcttccgcgccctgcccggagcggccagccattcggaagccatgcgtaacctgcttgtgcagccccacgcctactccttcaaggccattgcggaacaatggggcatgcgctacctagccatccgcacggcggaagatttcgaccagcttgacgccctggaggaaaacagccaggttctcgcggaactcatcccggaccgggaacagacggaacaggtcagaaacgcgctggctaagcactgaaccgttccgcccaacgcccccctccctcccatcagccggatggagagccgcaaccccttgcggcaactgaaaaaacggagcgcggacgaatgaacattggaaaagccagtgcgtccttcaaccgcctattcatccggaagcggcagaggccggaggcattccccccctgaaggcatctttccaaatgaagggctcaacaccgcctcaccgctacccggcataaaaaaccgggggaacggacctcccccggccaaatgcagccgccgggcgcgtaccacggcggcatggattttccggctttacgccggagccgtttacaaataactgcgcactacgccggaaacgcgctcccgggcggcggcaatgcgcttgcgcagttcaagcgtgtaagcctccatgtctcggatgggggactgggccacgccggaaatcatggccgcctgggccactgccgggcattcccattcaatgatgcggggatcgatgggcttgggaatcacgtaatcgatgccgaagctgaggggagcgcccccgtacaggtcaaccacctcctgcggaacgggttccttcgccagatccgccaacgcccgggcggcggcaatcttcatctgttcattgatgacggaagcgtgcacgtccagggcggcgcggaaaatgaaggggaagcaggagacgttgttcacctggttgggccagtcggaacggccggaacccatgatgcagtccgggcgcgccttcttggcgtcctggtacgtaatttccggatccggattagcgcaggcgaagatgatgggggaaggagccatgagcttcaccatgtcctgcgtgagcagccccttggtggaaagccccaggaacacgtccgccccggtgagggcttcatccagtgagcagtcctccgactgggagaactgggccttcgtggcgtgcaggtcgatgcgcccggtatgaatcagccccttggagtcaaacatgtagatatgttcgcggcggacgcccagcgtcatgtaaaacttggcgcaggaaatgcccgcggccccggcccctacgacgaccaccttcatgtcttccagcttgcggcccgtcagttctgcggcgttcagcagggcggcgccggagatgacggccgttccgtgctggtcgtcatggaacacggggatgttcatttcctcgcggaggcgttcctccaccatgaagcattccggggccttgatgtcttccaggttgatggcgccgaaggtgggctccatggtcttgataacctcgatcagtttttccggctccttgacgttcaattcaatgtcaaaaacgtcaatgtccgcgaacaccttgaacagaacgcccttgccttccatcaccggcttggccgcatccggaccgatgttgcccaggcccagaacggcggtgccgttggtcaccacgcccaccaggttggagcgtcctgtgtacagggcgctctgggaaggatcctccttgatgcggaggcagggttcggctacgcccggagaataggcaagcgtcaaatcccgttgcgaaaagcagggcttgcagggcagcgtttccaccttgccggggcggggctgggaatggtactgcaaggcatctaatctaatgtcggaactcatgatcgtaatgaaaaaaacaaaaaatcgagccttgcttgcaccacataatagccatgtattcaagtaaataatcaattaatcgcgtcacacgccgcagccggaaagcgcccttttacattgaaagagctctccggatgtggtaataagtagctggattatcaattgcctcctgaccatggaaaccactcccccactgccttccggatttaatatcaacggctaccttatccagtcactgaagcagacggatgccctctgccatgtctattacgcgtcggacgccaaccacgtgcaatacctggtccgtgaattctgtccgcagggccttgccgtgcgcgatccggaaagcggaaaactgcgttatccggaaactacggacatcgaacaggaagtccttccgctgaaaaacgattttgaagcccagttccgcaccggctccctgggggaaattcccgccctgggcaccatgtacctggtttatgccctgcccggcgttcatcccgccgcggagcagtccccgcttccggctactcccgtggagcccctccagcgcgaccagagaaccctggccactcccgcagcaggagcgccccccgtccatgcggtacccctttcccagccccggaaaaagaaaagctccgccggcatctggatccttatcctgattctgctgggaggcgcctgcgccgcttattactacacgcagaagcctgcggaggactccgccgccccgcaggaaccgtccagtacgcagcccaaaaaagagaagaaggaagcacccaaaccggaaaagaaagccgccctgcctgctgcggaagtggaagacccctttgaacaggaaagcgccgccgcggaggcccccccgggtggagcagcggaacagccggaagaaacgccgtccgccagtgcccctgaggaacaggacgaagacggctccgccactcccgcggaagaacctgctcccgaacctgaacagcctgccggagaggcggacgctccggcagacgacgccacgtctgcggaacagccggaaccggaaactcccaccaaacagaaggatgctccggccctggcggcacaagctgccgtcaaacccgcctcccccggccgtccgcgcggaaaagccgccaggcagaccaccaacatgggggacgtcaacgcctacgtgaaaaaattcgccaaggccatgacgctgaaccagtggaggaagcagtacgccaacctgtacacgagctggttcggcaactccgaggaagtggccaagggctggatcaccaccttcggccctctgggcttccgcgcccgcggcctggacgcctcctggccggacacgaacttccggggctttttcccaaaaaccctgctggaccccaatggggaacccgtggcgaacctctacatggtcacccaggtgattgaaggctcccctgctgaaaaatacgtgaaggagggcgacctgatcctgggcattgacggccagcccttcaagacggcccaaagcctggatgtgctttacggtccctaccagcaccaggacaggcgcggcctggacatgcacgcgggcctgctggtggacaaggcggaaggcgccggaaaaatcaccctgaacctcattcctgcggaaaatgtggagaaaatccagggcatccagccgctctggaaggaagtcttccgggaggaacgggccaaaaagcccgtctccctctccattccggtgaagggaggccagcaggtgcgccttcatgtggatgacggcggcaacggcatcggcagcgacggcttcgaatggtcggacctgaggctggaaggccccggcggccccgttccgctgaccaagctcaagcccctgcaatacagcgtgggctacggcgcggccaaatatgaccccgagcgcaaggtgtggctggctcacgccgtctcctccctggtctttgacattcccaagggagactggaagctgaaaggcaccggaacgcccggaggggcggcctccgtaggtgtggctgtccatgtgggcggttccgccaccctgccggactccgtgaagaaatacgtgaaaaacgtcacgttcaagattccccagctgggaagctacgctctcggcttcccgaaaaactgcgccaagagcaaggccgtggtccacatgatgagcgaatggctggcggcccagcagcgcgaggacggctcctgggaacgcccgggcggctactgcggcaaccactacgacacgggctgggccgggctggccctgatggccacgggcaacccgaaatatgatcccgtcattaaaaaggcggctcagtacatcgccttctccggctcccagtgctggtgggccgtcccccaggcctccgcgggcatcttcctgtgcgaatactggctgcgctaccgggacaactccgttctgccggccatccgcaacggcgtgcagcgcatgaaaaacgaggttctttacggggacttcgtcaccggccacggcatccaccccggctatgcgggcacgggcgtcagcatcggcggctcccacatgtgcctgttcctggcgctggccagcaagaccccggcgcgcacggaagacgacgtgctggacaagatgatggaccacgcccagtccatctgccccaccggcatgggcccgtacggccgcatgacggaggccttcacctttgaacccaaccgcgaatgcgggggcacctactccggccgccacggcccgtactacatcgcctccctcatctgcgggggaccggaactctacactaaaaacagccgcatcatgtacggggaaggccccatcggcggctgcgaccagggccactcctccgagacgctctccatcatgtgggcccttcccgcctactggcggacgaacccggaagtctactacaagaacatggaggcgttccgctggaagctgacgctcctgcgcccgtttgacggcggcatgatgcaaaaccccaaccgcctggaactgatgacggcagacccggtcatcggcacctacatccgcaccagcgtctggatcacggcgctgtgcgcggaacgccagaacctggcgatcacgggcaagccggaattccaggccaaatccttccggaaggttccccccatcattgacacggaatcccgcttcctgaacacctatgtgcgcaactggtccatggtcagcgccgcgctgggcgccaaggctcccggctccctgaaatccgccatccgggaactgaaaaacatccccgtggaacagggctgccgcttcaagctcatgagcgtcgtcaatgcccgggcccttcccgtcgccaaggccatcatggccattcccggcctggaccagctcaccaaggccacctgtgcggaaatgatcctgggcatggacgtgcgcatcttctttgaacccaagcggaaggacgacaagccccagcccggggaatactccctgaacgtggacgtccagcagccgctggggggccgcgccctgggccttcaccgcgacaaggaactggaaggaaaggccaattccgcctacaagtacgactttgccggcaccgtccaattcagtgacgccaccaccttctcccccatggaaaccatttcctggacccccgactccaaattcggcggccagtggaacgtgtactcctacaagaaggagctcagcggccccacccagccgggcgtgcagaaaatgagcgccaaaatcaaatggcgcgtgaacgacctggacgtggaatatgaccgccccatcgccgtaggcggctttgaagtgggctgcggggaaaaagcccacccggtcaccaactgcaaccacctgtgggtgccgggcatcctgatccgcgaccacggcaactggggctgctccttccacctgccggacggcacctacatctccgcagcctcccagggcaaccagatagaggtgtacgatgaaaccgacaagaagaaggagaaaacctgggtctccccgaacgactcttgcctgacgcaaggctcccgctgcctgttccgcgtttccacggactggcacggcctggaatgccgcgtgcgagaactgaagctgctgggcagcgccacggaggaagtcacggactacaagctgaaagcctccaccggaggccatgtggacaccgccaagctgctggaccgggacgccaccaccatcgaggaactggacgcctcccccacggaagacgatcccctggtgctggaactctccctgaaaaacgccgcctccctgcgcgccgtggacatcaagattgaaaaggggtacaaccgcctcgtcattgaagccaacaagggcggcaagtggattcccatccactggggttccctgggagccgctaccgccggcgtcagcgatgcgcagaaagccatgtacgccaatgagccagaggtgctgcgcatgctccagctccccggcaacggctttatcaagtgcatgaggacgtttgagcctatcaccaccaacaggctgcgcgtcaagctcttccagaaggggggcaaggtccgcctggcggaactgcacgtgtacaaggcggattccgccagaaacgttgcgcgttaacattgggcagccttccacaaccaacttgcaatgacaaaccaatccttgccataaagaaatcttcacaggggcatgcccctgtgaagaaaaggggctctacctctccagcgaggaaaagcccccttacacgatattcgggctgcaggcccggttcttggccattgacgcctcttcctcctgtcccacccctccctgttatgtccatcagaacaacgctccttcttcttttccccatcgtttcccttgccgggccgcctgccctggcggcaaccccgtgggtctccggcaaagactgggaacttgtttttgaagacgactttgacggcccctccctgaatgcccgcaactggagccgtatcgattacgtaaaccataacgccccggattggcgcaaataccaatcccaggacgaaagccttgtggaattccgggaacaggacggcaattccgccatgaccctgtggggaaaatacggagactacaccacccagaccaatcagaccgccccagcccagacctatgcctgcggaggagtgtactctctgaaaaccttccaattccaatacggctacgtagaagttcgcgccagattcgattgcgtgcagggcgtctggcctgctatctggatgatgcccaaatccgacagcatcggatggccggcaggaggggaaattgacatcatggaacatttgaattacgaaggacgtgtctaccagacgatccactggtctgaaaacggcgttccaaaccaagacaaatcccagggggtcacccccggctggagcgacggcgctgaaaaaacaaactggcacacctacggaatggaatggacggaagaaggcatcaccttttatgtggacggaaaggaaaccggctcctttaaaaagcccaataatgcaaactggccttttgacaaagacggaaacgaattttacctgatcatcgaccagcagatcggaggcaactgggtagaaaatgcaggggttaataaaggaattgaccagaatacgctggccaactccggagccgcgttcgacatcgactacgtcaaagtctattcatcaagcaaatacaaccacctcgtgccggaaccggctacagccgcgctgagcctggttggaacggccatcctgttgactcgccgcaaaaggagcagactttaaacactcccttcctccccctgtcacggggataaagctcccggcttcattcccggcgcactttcggcataaggccgtcatcggcattcgcgtcaatacttctgaaccggagaggaaggcgactcttcatccgcctccccttccgccaggcggcacaaggcctccgcgcggcgcaggcaggaatcccacagtcctgccttttccgggaacgggaagcacagggaatcgctcagcttctccacccgcttgaaggaatcatcccggtcataggcgtccaggccttccaggcgggaagccacgccgtccagccaggagagggggtcatggcaaatcaggggaagatcgcacccggccttcagggaaagcagggcggcttcatccggagcatgccgcgccgcaatcgcccccatgcacaaatcatccgtaaacaccactccccggaagccgagcctgtcccgcagaagccccctgatcacccgttcggacagggtggcgggataatcgggatcaatctgcggcagcatgatatgggcggacatgatggaggaaagctccggacacagggccagaaagggcagcaggtccgtcttgaacaactcacgttcatccaggtcaaccacgggaaggctgaaatgggggtccgcctgggcgcgccccatgccgggaaaatgcttgccgcagctttgcacgccgccccggcgcaggttggaggaataaacgcctccgcgcgaaatcacgtcctggggattgtctccccagcagcggccgggcagcgcattggccgcggacgggtcatggcaaatatccagtaccggggcaaaattcaggttcacccccaggtaccggagcgccatcgccgtcaccgcgcccagttccacaatgccgttaaaaccgccgctccgcgccagagaagcgggagaaggcaaattcaggcccagggaagcggtgcgcacaaccctgcccccctcctggtccacggcaatgacgggatggtggcggcagagcttccgcaacgtttccgtcaggctgcgcacctgctccacggaatccacattccgggaaaacaggatgaagccggccggctgcaaacgcaggatggccgcctcctcttccgcgcccacttcatggccgcttatgccgatcagggcggggagcatgaacggaaaaaaattatttgcccagcagggacgtcctggtgtacaggggataaacgggaatgccgcgttcctcaatcgcctggcggccgccttcctcgcggtccagcagcaccagggcggcggctaccttgcccccttccgcctcaatggcgtcaatcgccttcagggtggagccgcccgtcgtaatgacgtcatccaccaccaccacggtatccccggcctggaaattgccctcaatgcggcgtccccggccatggtccttcggctccttgcgcacggtaaacacctggagcttcttttcagccccttccagagcgctggtcatgccgacggccagggaaatggggtctgcgcccatggtcattccgccaatggccgccacctccgggaaacggggcagaatctcctcctgcaccagcttccagcccagcgcgcccaccagcgtggcccccacggggtccagggcggtcatgcggcagtccacatacaggtctgacaccttgccggaagccagcgtaaaggttcccgtgcgcacggatttttccagaagaatgcttttcagaaggtcgtattgttcactcatggagatatggatggatgaggtggttgcgccgtgtataacagatacccccggaataagcaacggataacagcatgcaaatcttgacaaaagggcggacaggctccataacctgcctgtcattctcccgttcccatgaaacccggcatactggcattagcttctatcagttccattctcgtttcctgcaatccatatggaaggccccccctgtttgataaaatcgccgggaaaatccagggcgcgtccagccaggacagctacctgtccggcgtgggcgccacctccggcgtgaacacggacctgccgccggaagcccgcctgggccagggatactgggacctgccttcgggcattcagggggaaaagcacatcattattgacctcaagcagcagaaagtcttctactacgtaggggccacgctggtgggcgtctctcccatgtcctccggcaaggaaggcttcggcacgcccaggggaacctacaagattatccagaaggacgccaactacaaatccggcacgtacggcgttctgcgcagcaaatccaccggtgccgtcgtcaacggggactataacgccagggccggcggcgcgcccgcaggaacctacttcgaccccgcccccatgccctactggatgcggattacgggcggctacggcatgcacgtgggctttgtcaccggatacccggtcagccacggttgcgtgcgtctcccggcagacatggccaagacgttctttgaacacacacctctcggaaccaaggtcaccatccgctagcccttcccggcggctccctgctcgcagggagaaaaaaggccctcttccggcttccttgaaacgaggttttccccttcttccagacgggtgcccgcgctatgcggacgccatggcacagcttccgcactccggaattgacaaaaggctccggacctccttaaataaatgagtctttgatcttttgattcgtcatgacagtacctcaaacccctgcccttccgtcccatttcaacataggcggctatagaatcacggcgcttgtagaaagcggtccggattataacctgtaccaggccatctccccggaaggccaggccgtcctgatacgtgaattctgcccccagggcctcgtcacccgtgacctggctaccggggaattgtccgcggccccggaaaaccgggctcaattctcccaggcgcaggaagcctttgaaacccagtactccgccaatgcggaaggcaagctgaggggcttcggtaccgtgctcttcctttacccgctggcacagccgcaggctcaagctccggcacagccccagccggccgttgcccacgcccaggccctgcgcccggccaaaaagccgcagcagccccagctccggaagccggtaatcggcgccgtcacgcccggcgcgccgctgcccaaggtaaagcgttccggcggcttccccgtcatcacggtcatcgttaccggaatgctcgccctcttcggcttcctgggctaccagatcctcaaggacaaaaaggaacccgtcgccaaaaccgtggcgcccccggtagtggttccgcccaagcccaaacccaagcccgctccgcccaagccggaacctgtggtggttgccccggaaccggaacccatcgtcgtggcgcctgaaccggaacctgagcctgagccagaaccggtcgcgcccgatctttccccctccccgcaagtcatcgccatggaaaaggcgctgcgggaggaagccatggcctccaagggcaaattttctgaaaagcttctggctaaataccccctttacgcggaagcctacgtgcgcgactacgtgaaaaagcgcggcggcaccttctccccggactttgaaaaatggctgaaaaacactaagaacaaccgtgaagtcttcgccatgttcttcccgccggaccccagcgtcgccaccaatgtggccttcatgattgatgaactgggcctggaaatgacggaaaaatacaaccagctcgtcctggcctttgcggtgggacgccgcgaattcggcatgggcgccttcgacctcacccagcagggccgctacattgacgccctgggcaaactgaacggcttgaggtcctccggcgtcatgcctccgcccgcggacctgtactgcgccggcaagccccctgtgaactggtacggaaacgctccgcgcacggtggatgaagaatgctacaaaaaggtggaagcctacctggaccgcaagaaaatcacgcccaagcaggcatggatcaacaaataccccacggtctcggaaataggggacaccgccattacggaaggcaacctggccggcttcctgcacgaatacctgtaccgccacggccagctgaggcgcaagagggacccgttccccaccccggtggaattcttcacctacctggtggacaaatatgaaaactgcagcaagctgcgggacgtggaccacaagcgcgtggaatggaccggcgtgtccctggaaggaacgccctggccggccatgatggccctctcggaaacgcgccccctgcgggaatgcgacagcgtgtgggaacgctacatgggccagcgcggcccgacgcgcctgtggctgtacggcccctaccgcatggatgacgacaaggagccgcccatcctgttcagctttgaccctgatccggaatggtcccgggaatccaatgaacgcaagcttcatgaaggcggcgtttgcggcaccatgtccctcatctcccgcaactcccagattgcccgcggcatccccgccgcccctgccggacagcccggccacggcaacctgatgaccaccaacttcaacggcaacggctgctggctgagcgtgggccagagcgtagacaccctgaaagccaccacgggattctggtacttccgggactccaaggcgccgcgcaccgggaatgcggaataccagtccggactggccctgtccatgaacatcgactacgagaaattcatcgacagccgcttcgccatgaacatctacaagctcgcgggcgcgaactcttccacggaagaggctcaagacccctccggcacgctgcccagggaattcacgcagaccgccatgagaaccgttctcaaggccaacccgttctacacggaagcctggtacacgctcttcaagcaggctccccaggacctcatgggggccaccaagatggtggatgaagtacgtgaggcccttccggacggcatgggcatcagaaagctctggaaaacgcgcaaatacgtctcttccgtaggccgcggggacaaaaacggcaaggaaatgctggccaaccacgccaaggaatacgtcaatgtgctctgctccgtgattctggaaaacgccctgaagcaggaacatgactacaagaccttccagtgggcggacctcatgtcctggctcaagtccgagtccaagcgcaactcctacccggaaccccaggccgcctaccagatagcctatgccaaggcccagggcacggacaggctcaagaggaccgtggacaggggcttcaagaaagccctcaacttctaccgggatgaaaacaatgccctgaacgctcccaaggacgtggatcaggaggaaatgtccttctccctggacgccctgtgcctggccctgcccaaggaggaactgatcccctggatgaaaaacatggtggacacctgcccggacgggttcaggtacaagcccaagaacaagaaggaaacgaaaattcaccccttctacagtgccctgacgaagaactacatgtccctggccgacggtacggaaaaatcccgcgtcaagaaggagatgaaggactcttccgccaggattctggaactctcccagaacaagaagggcgacggggaaggaacctccggacgccgccggagacgctgattcccgccgcaccccgtgcatctttacgtccacatccccttctgccaccgcatctgcccgtactgcgccttcttcaagcacacgccggcctccacggacatgaagctcttcatccgtgcgctggggcgggaggtggaatcccgcgccgccgccctgtccacggaccgcgggggggaaacggccacgctctactttggggggggaacgccttccatgctctcggacacgcacctgggacgcctcatggaaaccctggaccggctcgtgcccgtagacaggctggacgaattctcctttgaggccaaccccgccacctttacggaaaaaaaagtgcgcttctggcgtagcctgggcatgaaccgcgtctccctgggcgtgcaatccctggaccccggcattctgcatctgctgggacgcgaacacaccccggaacaggccctgcactccgtggaaatgctgaaaaacgcgggaatgccccatatcaacatggacctcatgttcgccattccggggcaaaccctctccacctgggaagccaccctcagggaagccgtccgtgccggaacggaccatgtctccgcctacaacctcacctatgaggaagacacggaattcttccggagcctgctgcggggggaaaaaaggcaggatccggacgaagacgcagcctactttgaactggcggaacacatgctggaagcggcaggcatgcaacactatgaaacctccaactacgcccgggagggctgccgctccccccacaacatggcgtactggaagggtgaggactacgtgggcataggccccggcgcagtcagcaccatcaacggcatacggtactccaacacgcgggacacggacgcctacatacgcagcacgctggaaaacggcctccccctctccgaacaggaacccgtcaccgcggaagactaccgcctggaacgcattgccctgatgctccggacggatgaagggctgccattgaaatatatccttccggaatcccgccccctgctggaacaataccgggaactgggcctggcggacatttccccggaacaaaggctcatcctgaaaggccgcggccgactgctcgtggacgccattgcggcggaactgtgctgacggaggggatttttcttctcaaaaggctgcggttcccggcatccatggaagccggatgttgaaataatcaggcatgagccatattattcttggcatttcaatatccagaggatattctgtcctatagacaatggtgtctgcgtattcggattttaacttctaatcccggctcttcgggaatgcatttaagaataatcagatcacttgtcttttgatcatatgaacacaaaaatgtacgtagggaatttgtccttcaattccaccgaacaggacctgagggatttgtttggttcccatggcgaagtgactgaagtattcattccaaccgaccgtgaatccggaaggcccagaggtttcgcattcgtcaccatggattccaccgattccatgaacgatgccatttccgccctgaacggaaatgagtttcagggtcgccccctggttgtcaatgaagccaaaccgcaggccaacacaggcggcggcggtggaggcggttaccgtggcaatggcggcggcggcagacgcgacaacaacggctatggccgcaaccgccgctaacagcggtaaaattgcgggaagaacattcgcttcttcctgatcaccacacttccagtaaggcccggcgctttcatgctcctggccttattatttatacaaggcttcccgggaaaggccattctccgggaagcctctttttatggctgcatggaatcccggagcgctgcctgccccgtgcggcctttcatcaagccagccgcttcaccggactattcctcacaacgggaatgtcctcccccccgttcaatctatctggaactggcgcgccatttttttcagccaccagtcccggtgccgcatttcatccctgctgcgttccagttcccggagctcgctgccgcgcagccctcccttcatgtaccgttcatccagcttgcgcgcctccacccgcgtatccttccgcagggccttgtaaaactgggctcccgttaccagcccgctggcggctcccccctggcccaccaggttcatgtaaagcttcctcagcctgttgtaatcctccaccacccggttgtatttcaaagcggcgtactggtagcgttccttccagtcctccggaccgggattgaccaggcggtcctccacggagccgggttccggcgcgggagccgggggagcctgtccgcgggaaggcagcggcgtaagcggcggaggctggggaacggggcgacggctcgtcccgggaatgccattgcccgtcatggaaaggggggaacgttccgtcagcaggctgtccatgcgcatctgctccagcgtttccagcaaatgggcacgctccttttgcagggaagcattcgcatcgcgttcttctgaaagcgactctttcagcgtccgcatgccgccggacatttccgaataaatcagcgcatacgccccgatgcaccccagcagaaagcccaggcccagcatgattcccctctcccgccacggtccgggactgcgttccggagccggttccggaacgtccggctccggctcatgggaaacagtcaggtagtgttccagcgggccctcgtcaggcatgggcttgattcagggttgggacgtgaaaatgccggttcagccctgttccgggcggatgctgtccgcgccgaagtacggcacgagcgcttccggaatgcggatggagccgtccggctgctggcaggtttccagcagggctacgtacaggcgcggcagagccgtgccggaaccgttcagggtgtggcagaactggttcttgccgtccgcgtccttgtagcgcaggcgcatgcggcgcgcctggtagtccgtaaagcaggagcaggaggaaacctccagatactgcccctggcccggagcccatacttcaatgtcatacgtcttggcggaggaaaagccgaggtcgcccgtgcaaagttcaatcacgcggtagtgaagctccagcttctgaagaatggattccgcatggctgcggagcacttccagctcccggaaggagtcttccggcttcagaatctggaccagctccaccttgtcaaattggtggacgcggatcatgccgcggttgatgcgtccggcgctcccggcttcccggcggaagcagggcgtgtacgcggccatcttgatgggcagctcgctttcctgtaaaatggtgtcccggtacaggttggtcacgggcacttccgccgtgggaatcaggaacatctgctggtcttccgtgccgtacatgtcttcctcaaatttggggagctgcccagtgccttccatgcactcccgcttgaccacaaagggaacgcccacttcctgatagccgttctccccggtctgcgtgtccagcaggaagttgatcagggcgcgttccaggcgcgcgcccgccccacggtataccacaaagccggagcccgtgatccgcgcgccgtcttcaaaggaaatcatgcccaggttcgcggccagctccacatggtccttcgggttctcaatggcgggtttctctccccacagcttgacctccgggttggccgtttcatccgcgcccacggggcattccggatgcggcaggttgggaatgttcatcagcagggaggtgagctgggcggaattctcttccgccaggcggtccagctcccggatgcggtccccgatttcgcgcacgcgcgcttcaatggaggaggtgtcctcccccttcttcttgagcatgccgatctgcttggaggtggcattgcgctcggactgcaaggcctgcttttccgtctcggcattgcggcgcgcttcatcgcacgccagaacgtcatcaacaagcttccacgcgtctccgctgcggggcttcaaacgcgctttcacttcttccggattttctcgtattacacggatgtcgagcataacgcgcacagcttgcactccatccctccgccacgcaagccaaatgaacggactttcatggaaaaactgcacctgcaataacgtgccttttactccggcgcggcgcggttactgcggaaaaacacgccgggagcgccgcatgccatgaagcgctcccggaggctttttgatgatagctggagagacagcggaagatttgctgaacagtttccggaaaccactgtttttatgcgttttccctggatgcgggagtattgcaagaaggggcaaaaggggaatttttctccgttttcagcaagttaattccctttcatttttatttgttcttgaagagttcaaacggcaaagggtagtgtaggagcactatgcaacaaaccgcacgcgccgctgtcctgacagctcccaagacatttgaaatccgtgaataccccattcccgccatcggggatgatgaaatgctgatcaaggtggaagcctgcggcgtttgcggcacggacggccacgagtacaaccgggaccccttcggcctctgccccgtggtgctgggccatgaaggcaccggggaaatcgtcgccatgggcaggaatatcacgaaggacacggcgggcaatcccctggccctgggggacaagatcgtcacctgcatcatcccctgcggcacctgtgacgcctgcctgaataccccggcccgcaccaacctgtgcgagaacgtgggcgtgtacggcctgatgcctgacgacgacgtgcatttgaacggctacttcggggagtacctggtcatccgcaagggttccacgtttttcaacgtttccggcatgacgctggaccagcgcattctggtggagcccgccgccgtggtggtccattccctggaacgcgccaagtccaccggactgctcaagttcaattccgtggtgctcgtgcagggctgcggccctatcggcctgctccagatcgccgcgctgcgcacgctgggcattgaaaccatcatcgccgtggacggcaatgattcccgcctggaactggctaaggaaatgggcgccgcgcgcacgtataatttcacgcattacgcggacctggacggcctccttgacgcggtgaagaaagataacggcggccgcctggcggatttcgtcttccagtgcacgggcgtaggcaaggccggggcaaacgcctggaagttcgtgaagcgcggcggcggcctgtgtgaagtgggctttttcatggacggcggggaaagcgtcatcaaccaccattacgacctctgcaacaaggaagtgaccgccgtgggctcctgggtgtattccccgcaggattacccgaccacgttcgacttcctgaagcgcgcctacggcatcggactgccgctgaccaagctgatttcccaccgcttcaagctggatgaaatcacggaagccctggaaacgaacgtccagatgaagggcatcaagattgccgtcatctgcgactaagcggaaactctttttcttacctcaacgccgttcctccgggagcggcgtttccagaggggaacgtcactcatccaatccagggtagatatccttccagtccaaaaaacgctccgtattgggaggaacagtcatgatagccgcgacttttcttttcaattgcaccaatgcgtcagggtcaagaaccatgggttcgctcactttaaggtacgccccttcccgatgcacctgtctctccagcgtcaaatatttcttgatgacgccgtcggaatccagggcggcatcaatgacgaaatgcagcaggaagccggactcctgaaggaaaaaatcaaattcataaatccaggaaaaacagcaattctcgtcgtcttcctccttatcatcattcagctcccttctggggattccggaatcatacagacggttcagttcctgcaagagggacaggatgtgttcacgtctcaacacggttacctggcacccctgctttcccagcattccctgccgacaatcgatgactaattcacggcactgtccttccatggcaagaagcacttccacggcctgctcccgttgccggtccatgggttcccgcgaatacatgagctgggtcttctacagattcactttccccaccgttccgtgatgccgccgtaggagtctatgcggcggtcgcggaagaagggccagatgcggcggtggtcttccagcgcgtccaggtccagctccgcgtacaggatggcttcatcgctgacgggggccttggcgacgatttggccgtagtagtccgccacgaaggactgcccccagaattcgctttccccttccgtccccacgcggttgacggcgcagacgtagcacccgttcgccacggcgtggccgcgctgcacggtttcccacgcgcagtgctgctgttcccccagcaggggtttttcctccggcagccagccgatggccgtggggtaaaagatgatttccgccccctgcatggccgtcaggcgcgcggcttccgggtaccactggtcccagcagatgagcacgccgatgcgcccgaatttggtctcaaacgccttgtagcccaggtcgccgggggtgaagtagaatttttcctcaaagccggggtcctgcggaatgtgcatcttgcggtacatgcccaggaacgttccgtccgcgtccaccacccaggcggtgttgtggtacagcccggtggcgcgcttttcaaagccggaggccacgatcaccacgcccagttcagcggccagcttgcagtgggcttccgtcagttctccgggaatgggttccgccaggttgaaaaggtcgcattcctctgtcctgcaaaagtattccgtggtgaagagttcctgcgtgcagatgatctgcgccccatgggcggcggcctcccggatggcggcttccgtcttttccttgttcacggagggccgggcgtctgcggacagttgaatgagtgcgattttcggcatgccccttccttaccccgtttcccctcccattccaagcagggaaaatgaatgcggcgcgattatttgatggaaaagggcatgaaaagtgttatgtacatgcaatatggaacccaccaccccatctctgcctgacgacgacgtagccgccattgaccggctcggcgccatttacaaggagctttccgcggaattgagcaagatcatcatcggccagcagcgcgtcgtggagctgctgagcatcgccctgttctcccgcgggcacgcgctcctgatgggcgttcccggcctggcgaagacgctgctgatcagctccgtggcaaagacgctggacctcagtttcaaccgcatccagttcacgccggacctgatgcccgcggacatcaccggcacggatatcatccaggatgattccgccggcggcaagcggcagtttgagttcatcaagggcccggtcttcgccaacatcgtgctggcggacgaaatcaaccgcgcccccgccaagacccagtccgccctgctggaagccatgcaggagcgccgcgtcaccgtcatgggccgcaccttcacccttctgcctcccttcttcgtgctcgccacccagaaccccattgagcaggaaggcacctatcccctgccggaagcccagcttgaccgcttcatgttcctgattgaagtggattaccccacggaggaggaggaaatgcgcatcgcccgtgagaccaccggaaaccgcagcgaggagctcaagcacgtcctctccggggaggaaatcattttttaccaggacctggtgcgccgcgtgcccgtcccggaacatatttacgagtacgccgtgaagctggtgcgcgccacccgcccctccctggagacttctccggaatgggtgaagcagtacgtggcctggggcgcgggcccccgcgccgtccagttcctcattctgggggccaagacccgcgccgccctccagggcagctacatcgtccgcaaggaggacatagacgccattgtggagcccgtgctgatgcaccgcgtggtcacgaacttcgccgcggagtcccagggcatcacgccccgcaaggccgtggcgcgcctggcggcggaagtgtgaccgttccggcgtaatccatccccttttcctgccctcccatgaagtacctgaaccacgacctgctcagccgcctggggaatcttcccctggaagcgcgccacagcatgacggggaacgtatccggccgccacaggagcgccaaccgcggctcctccgtggagttcgcggagtaccgcaagtacgtttccggggatgatacgcgccggctggactggaaggcgtatgcccggtctgacaggtattacatcaaggagtttgaggcggataccaacctgcgcgcctacatcgtcctggacctttccggctccatgaattaccacccggagcaggtggagtccaagtacctgcgcgcgtgcaggctggcggccaacctggcttacatcgccatccggcagggggacgccgtggggctgagcttttcccggcagacgaaggacggagccacgctgcatatccccgcctcccgccgccctgcccacctgaacgttctcatcagccagatggatacgcagtaccccaagggggaaaccgtgctggcggagaccctgcatgaactggcggaacgcgtcagccgccgtgccctggtgctgattttttccgacctgttcacggatacggaggaacttaaaaacgccctccggcacctccacttccgcaagcatgacgtggccgtgttccatctggtggaccagctggaaattgattttgactttgaccgccccatccgctttgtggacatggagggcggcggctccctgattacggaaccggatctcatcgcggacgagtaccgcgccatcgtggccggctacctggaggaaacgcgccgcatctgcacggacattaacgcggactaccgcctggtcaggaccggggacgccttggaagacgtgctgaccgggttcctgatggggcggcagaagaagaaagcgggcagataagcgcccggctgtctcacggaacggttgattgcgccgcggaacgggtgcaggatttcccgcgcgccttccgtgccaccgtaagcggcagttttcatttttttctccttctcttccatcgtggacgcacccgttaaaatgatcgtgggcctgggcaatccgggcaggacttatgaagatacccgccacaacgcgggtttcatggtggtggaccgcctggctgccgggtggggcgccgtgttcaagacggacaggcagcgcaagtgcgagctggcggccggccccggcgtgctgctggtgaagcccgccaccttcatgaatgaatccggcctgtgcgtggggcccatgatgcgcttcttcaagctggacccgcgcagcgtgttcgtcatccatgacgaggtggattttccgctgggcgtcatgaaactgcgggaaaaaggctccgcaggcggccacaacggcatcaagtcgctcatcgcccacatgggcacgcaggagttcccgcgcctccgcttcggcatcggcctgccacgcggcaaaggggagatgatcggccacgtgctgggcaaattccgcccggaggaacgcgagctcctggacgtgatgctgggaaaggcggcggacgccgtgctgtacaccatggaacacggcatcacgaaggcaggcaacattttcaacgccgtgcaggaccattagccgtcgggaccgccgcaagcccttgcggcattaaaatataaacgcgcggggaacggacgcgctttttccttaaagccggcgcgtcctgcggacgcaggatgattcagtagcctgcggggttccgggagattcccgggacgcatgccttcttttttcgctcgccaacagtgtacggtattgctaaacaaacgggaatccgctaggatttttgcacgttttttctcctcccaggacaaatcctgcttcatcttcatggctgaattaagttcacaagctccgcgcaggcacatgcaggccaacaaaaggcgccaacccaaggccaagcccaggaagcgattctggagcttcatccggaagctggcgctgtggtgcctggttctggccgccatcgggggggccgtgggctactttggcttcatgatggcctggaaacgctatgacaactgggcggcggagtttgacctggaacgcatcaacgacctggaaaagcccagcatcatttacgaccggaacggggaggaaataggccgcatttatgtggaaaaccgcagctacgtcacgctggacaagatttcgcccgccatggtcaacgcgctgatcgcccaggaggactcccgcttccgggagcatccgggctatgacttcctggggattttgcgggcaggcagggaatacatccacaacagcggggacgccaaccagggagcctcttccatcacccagcagcttgccagaaacgcgtacgacctgaagaaccgggccaaggccaggaatgaaggcagctttggccgcaaattcgtggaaatagcgctggcgcgccgcattacggaacggtacagcaaggaccaggtgctggagttttacctgaaccgcgtttacttcggcagcgggttctacggcatccgcgccgcctctctgggctacttcggcaaggaacctgcggacctcactacgcgggaggccgcctccatcgccgccctgattaaaaacccgaacggcctttcccccctcaataatccggaaagcaacctgaaatggcgcaaccatgtgctcaaccgcatggcacgggaaaagtacattacgccggatgaagcggaacgcctctccgccatggacctggggctcaaccccaggccgctgaaacgcggcgtctcccacatttacgaccgcatttccgcagagattaccgcctatctgggggaggaccgcgtgaatgccgccggcctcaagatttacaccacccttgacaggaagcttcaggaggccaccgggaaatccctggaacaggccctggaaaacattgaaaaacgccccggctaccgccaccagaaggccgcggactaccacggcgcctccggggacaagccgcgctacctggaaggagccctgctggtggtggacaaccagtccggcgccgtcctggcctaccacggaggcagggactacaccaagcgccagtatgacgccatcaaggacggcgcccgccccaccggcaccgccatcctgcccttcctgtacgctacggcctttgacacgggcaaaagccccgtcacccgcattctggacgacgccattgacaaccgcctgacgggcatcggcggctcggaaggcatcctgggggaatggggcgcggaaagctccaaaaaccgctatgaaggcatgattaccgcccaccgcggcctgtccgcctccaagattgccgcctccctgcgcatggggatggacatgggcacatcccccttcgtgaaaaagctcacggacttcggcatccgcaagcccgtgcgtgaagcgggcagcacggaggtaaaccccgtttaccgccccaagattttcgtgggcacggaacccgcctccctgaaggaaatgacgctggcctacaccgccatcccgaacggcggctcccgcccgcaggatatttattacctggacaggatagaggatgaggacggccagttgatctgggaatccaaccaggccattgaaacccggaacaacgcccaggtgcggaagggggccacctccaccgccacggccttccagctccacaacatcctgaattcctccctgaaaaacggctccgcccagcgcgtggccccgcatctgccgaaagacttcaaggggggcgtgaaaacggggactacgtatgactttgcggacaactggctgttcggctatgacagccgcatcacctgcggcatatgggtaggcttcctggaagggaaaaaacccatttacaacggggccttctcgtcggacacctgcgcctccgtcctgggcgccgccgtcacggaggcggaacgcctcttccccgccggggaactggccccgccccccagcgtggaacgggtggaaatctgcctgaccaccgggaagagagccacgcacagttgctatgacattgacccggtggacaagaaataccgccgccacaccatgtttgaatacctccgcaagggggattccagccttcccttctgcgacctccacggggaggacatctccgcccccgtctcacccttcacggcgcagaaccgcatcctgcccctgccgcccatcctgcccaccaaggccatcctccagggggacgacccctaccacacggagctgaaccagggccccgccaaccgcaactatgaactgctgggcgcgggtgaaaacgtgccggaagcccaggccctttccgcagaccccgtttctccggaccatacggacacgagcatcacgctgcccgctcccaagcccatcaccatccccgttccggaattcatccacctgtaactcccttttcttccatgccctccccctcccaggatacggtagcctgcacatgcccgtcatgcggaaacccctttgccgtgaaaacgtcttttctgggaagccaggtgcaatgccccatctgcgccgctccggtcaccgcccggcaggaagagaaagtcaaggatgaaacggaagaacaggccgccgtcccctgccgctgcaacgtatgcaacaattcctttgccgtcaatccctcctgcatagggaacaaggtgaaatgccccgtctgccattccaccgtcacggccacccggcaggaggaagagccagcaacggccccggaacggatgcctgaagctccggaaaaagctcctgaaatcccggaagggacgcctgaaccagcagcctccgtccggcacggcggcgcgcaggaggaaagcccctccgcttccccgtccgcatcttcccacaaatctcttacgcctcagaaaaagacggataaacggagcattgccgttaccaggccttccatccccatccctgcggaacccactaccaaaatccgcaagcggaaggaaaagggggacgccgcccctgccatcacagccgcccgcagcgcctccctggcgcatgaagagccggaataccagcccaccgcccaggaagccgcccgcagcgagcgccgccccacctggcacatctggctctttgtctccggcctggtgctggcctcgctgggcgtgttcatgttcctgcgcggaaaggacatggaagcggaaggctccaagattctgaacatttcagaccggtttgtggaccatgaagcggtcttctccctggacgtgaacaaggacctgctggcggaactggagcagagggagcagcaataccggctcatgacccatccccgcagggaggaagaccgggaagtggaatccgtctccgcccacatcacggcagccatgaatgaactggccctctactgcatggcggaatcagacgaagaaaggctcaactacgtgatggagcccgaggccgtgcgccccaaaatggctcactgggcctcctacgggcggtacaaggactacctgccgcaggaagcggggaaaagctccaagaacggggacctgctccagatatccgtgctgatggatgacaacaccgtccgcccggccgtcttcctgtatgaccggaactccggcaaatggaagctggactgggaagcctgggagggttactcccccatgctcccggcggagctggaagccaaaaagccctccaaacccgtccccgtcagaatagccctcagcatgcccggcatctaccagccgcccttcctggaggaatcctccgcggaaagctaccgcaataccgcctacatcaacttctccctggaattccccaacggggagcgcctgaacgcgtacgtggacaggtattccccgctggcgctggaactgaccaagctcctttacaacggccccgtgcgcgcctgcgtgctcattcactacccggcggacctgcccggcaaccagtccgtcattattgacaagctgctgtattccggatggatgagcgacgccacccgcaacctccttcccaccaactgacaatccagaaccggttcccgttttccatgagttccaaagcattagcgcaaacacaggacaaagccctccaactcaatctggccaccaccatttacggcacctttgcggaaataggcgccggccaggaaacggccaactggttcttccgtgcctccggggccgccggcacggtggccaagaccatctccgcctatgacatgaccgtcagcgacacgctgtacggccccgtcaagcgctacgtctcggaagaacgcctgaaaggcatgctggattacgaattcacccagctcgtcaaccgcctggggcccaagcgcggcaaggacacccgcttcttcgccttctgcaatacggtgaaggtgaaaggctaccgggacaacggcccgtggaacggctggataggcgtgcgcttccaattgaagccggaggcggaaccgtccgacctgatcatccacgtgcgcctgaatgacccggaccacgacagccagatgaaggacctgggcatcctgggcgtcaacatcctgcacgccgtctttttcaaaagggaccggctggaggaattcattgaatccctggtggacaatctggatccccgcctggtggagatagacgtcgtccgctttgagggccacggcttctccatggtggacaaccgcctttttgcgctccagctcgtcaaatccggtctgacgccggccaccctgttcctggcaaacggccaggtggcccaggcggcggacgtgctgtacaaacgccccatcgtgctgatgaggggcagcttcaaccccgtctgcaacctgcatctggaagtcatggcgcaggtgaaaaaatgcttcctctcgcacatcaatgagacgcaggcggaccgctgcctggaaatctgtgaaatatccatgaacaacctgctccgcggcggggacgtggaccatctggaattcctggaccgcgcggacagcctgaaagccctgggcaagaacgtgctgattaccaagatggcccgttttgacaacctgtccgagctgctggcgcgctacacgaacgagcccatcgccatcgccctctccatcggcctgttgaacgaactgttcaaggaaaaatggacggaggacatccccggcggcatcctggaatccttcggccgcaccttccagaacaagacgcgactgtacgtctccccctggctcaaccgcaaatccggggaattcgtcacggcgcgcaccttccgcgccccggaacaatacgtgcacctgtaccagcacttcctggcgaacggcctggtggttgacgtccccttcttcaatgaattcctgctgcgccacacgccgcgggacatccagcgcatgatcgccgcggatgaagacatctggaaaacgctggtccccgcggaagcgcaccgctccgccctgcatttccgctgacctcctctttaaaaagtctgtgcggccactctccagtgcttttccaacggcggcttacctgctacctgccggggaggttttacaggaaggaaaagtttccccctacggatgccctgggtattgggtggaaaccgcaaatatgcggttaacaaatacttccatcgttcttttcacgtccggccgcccctggaaatgagggcctccgtccctcatcgcagcctccgccggagcggagcgacgggtatttgaaagaaaagccgcctctgcgctccggaaaagcttttacctgcgagaggagggaatcttccggctcccaggacgccggaggcgcaaaaccaccgtgaatcagcatttccaccgtttccttttacgattgcatattctttcggtttcctcctccggcattgccttccctgcctcattccctgtcctgaacccggagaatccggcacagccacgctcatcctccccgctccgctccccggaacgtttcccttcttcaaactcatcttatcaggaaaacttaacaactttgtaagattgtcttgccataaggcgggaatctcattaaggtctccgagttccatttttatcatgaataccattattatcggctcccaatggggcgacgaaggcaagggcaaaatgatcgatttcctgacggaatccgccgacgtggtggcacgcggccagggcggcaacaacgcgggccataccgtaatcgccaacgggaagaagtacatccttcaccttgtcccctccggcatcctgtggccgggcaagctttgcgtcatcggtaatggtgtggtgctggaccccatcggcctggtggaggaaatcaatgagctccgcggccagggcgtctccatcacgaaggacaaccttctcatctccgaccgcgcccacgtggtcctccccttccacaaggaaatggacgccgcccaggaatccgccctcggcaaaaaagccatcggcaccaccaagcgcggcattggccccacgtacgcggacaaggcccgccgcataggcgtgcgcatggcggacatgagggatcccaggatttttgacgaagtgctgcgccgccgcatcaagatggcgaacgcggaaatggaacgcatgggccttccctccatggatgaagaaaaaatggtggcggaagtgactgccgccgcggacgtgctgcgcccccacatcaccaataccatcccggtcatgcatgaagccgtggcctccggaaagagcatcctctttgaaggagcccagggcgcttacctggacgtggacttcggcacctacccgttcgtcacctcctccaacacctcttccgccggcgcctgcaccggcacgggcgttccgccgcacaagattgaccgcatcatcggcgtgtgcaaggcctataccacccgcgtgggttccggccccttcgtcacggaagatgaagaaatctccaaccacctgcacagcatgggccgcgaattcggcgccactacgggccgtccccgccgctgcggctgggcggacggcgtgctgctccgcttctccgccatgttcaacggctttgacgaaatggccatgaccaacctggacggctacgacaagtgcccggaaatcaaaatctgcacaggctatgacctggacggtgaaatcctggcctatccgcccgccacggtggacgaatgggaacgctgcaagcccgtgtatgaaacggtgcccggctggatgcaggacatctccgcctgccgttcctgggaagagattccggaaaacgccaggaaattcgtcaagcgcatgagcgagctcatcggctgccccgtcacgaccgtgggcgtgggccccgaccgcgaacagacgatcgccgtgaaataacccccctattccggctttcccaagcctccctttaccttcaagggccgttccgcttccccagcgcggaagggccctctttttttctgccttctccgcctttttctttgcgcccccactctccactctccactctccactctccactctccactctccactctccactctccactctccactctccactctccactctccactctccactctccactctccactctccactctccactctccactctccactctccactctccactctccactctccactctccactctccactctccactctccactctccactctccactctccactctccactctctattgaaatccgtacaggagccccagttataaccagcctttttgccttcaaagcccgcccttccttctctcatattcccattcccgttcttctatggaagcgtttccacggccaactgccaaccaagggaatccgggacggaacagggggcctgcctttcctcctttctccccctccacgctgtttggaatacggcggcacggacgccaggaaacggagaaccgcatctgcttgctcatgcccggttgaatgaggcggcgggaggggcagtcttccctttttgcggaaaggcgggaaaaaacaggtattcgtgtcagcatttcagttgagttatgacacttccgtctgctgtcttgtctgattgtctatatgaaacatgtcatgcttccctccttgtgcgccgtcgccgtcgtggcctcctgcgatcccgtcctggcccagcagcccgcacccgtagtgacgaccacgcctccctacctgaacacggaacgcggcctgcgcgtgaaaaccctggaaggcagggaaataagccccagcctgctgaagggcatgcgtccggaagaacaaatcaccaagaggacgcccggcgttcccaccaggcccagcgttcttctccagcatgaggccaggccctccgcccccggcattgaatggtttgcggccaagcctctcaagatgatgccgtatctggacagttcctacgtcttcggcaacacctgcgcggaaccgaacgcctggatccgtgaagacatgatttccaccggggcgcagaagatcaagaccgccctgtccagatacggcatcacctattccgcccagttcggcttcaactacacgggcctgacgggcggcggcctgaacggaaagacggatttcccctcctataacggctccctgctgaccaatatcaccattttccgcaacaactccacggggagcggcctgtacctggcctccgagttcgacttcggcaacggctttgacttcaatgaagggagcaagggccccgccaccacgctgggctccctccagaatcccaccagttccttccaggggccggacccccacctcagcaacctgagcctggcatgggtgggagcgggcggcaagctcctgctgatggcgggccagctggacaccaccaattacatggaccacaacgcctacgccaactcacacaacaataacctgaccaacagcgtcttcggcaacaaccccatgctgcccctgacggacaactccctgggcttccatttcgcatggcagcccaccacctccttttacgtgatgggagccaccgccgccaacaacatgacccagaaccacaacccgttcaggaacctgaactcggacaactggacgaacgtgcttgaattcggctacgtggcggaggacttctgcggcatgggttccggcgtgtaccgcctccagcccttcttcaccaccagcaacagtgaaaacggcggcggcgtggccgtgaacttccagcagcagcttggccgcagcagccacctgggctggttcttccgcggcggctgggccagcgatgacgccgccacgctgaccggcgtgcgctgcgcggccaccacggggctggtgctcctctcccccttccgcggaaaaggcgcctccaatgacggctacctgggcctgggcttcctctggcagcagggcgccaaaaagaacggcccgtacgtgaacaagaatgaatacggcattgaactaacctatgtggcccaggtgacgcccaccatgacgctccagcctgacattcagctcgtcaagaatcccgtcaacggccgcaggggccagacggccgtggttttccaaatccagaacgtctggtcctggtaggggcagcccctgaaaaattggaaaatattgatcgcatttcccggaaatcgtgtctaaatggaaacgatttatttggaccacgcacatgaagcgcacgcagcaaccttccatgcaggaggcggagcaggcctccctgaatcatgagattttaaccacatggcgtcccggggaaaccctgggggaacacatggagcgccgcggcgtcagccggcgcgaattcaataaatggtgcctgaaaatgatcgccctgatgggcgtcgccaccgtgacgggaggcgtttccaacgcccaggagattgcggacaagatggccgccctgaaacgcccggtggtcatctggctccagctccaggaatgcaccgggtgcctggaaagcaccatccgcagctataacgaggagatcggggacatggtgctttccgccgtctccatgccttacgtggagctgctgatggccccctccggggacgcagccaacgccgccctggaagaagccatcaaggaaccccatatcctcgtcatcaacgggtccgtcccggtccatgacggcggagtgtactgcactatagccggggataccgtggaaaacatgctgcgccattgcgcggaaaacgcctcctatatcctggccgtgggctcgtgcgcgtacttcggctccatccaggccgcgcgccccaaccctaccggggccgtgggcatccgggacatcctgacggaccgcacggtcatcaacgtgcccggctgcccgcccatcggggacgtgattacggccgtcatcatgtacatccttacgtttgaccgcgccccggaatgcgaccaggagtctcgcccgctgatggcgtacggcacccgcatccacaataattgcccgcgccgcgcccatttcgacgccggacagttcgtcaacgtgtttgacgacgagaacgcgcgggaatgcttctgcctgtacaaggtgggctgcaagggcccggacacgttctccccctgccccatcgtcaaatggaacggcggcgtcagcttccccatccagtccggccacccgtgcatcggctgtacggagctgcacttctttgaccgcatgactccgttctacaagacgctgccgaacgtgaacggcttcggcgtggaagcctccgccaacgtcatcggggctgtgggcgtagccggcgccggcgcggccatcgccgcccatgccgtaggctccgtcatccattacaagaagcagcacatgaaggaggaagcgaacgtctccctgcccgccttcggggacgctcccggctcgcccgacaaggaaactgaagaatagccagaagctttcaccaccagattaccatgagcaattacacatcagcggacgttccggaatccagccgggtggtcattgacccggtgacgcgcattgaaggccacctgcgggtggaaatggaggccggggacggcgtcatcaaaaacgcctggacgtccaccacgcagtaccgcggcattgaggtgatcgcctgcaagcgggatccccgtgacgtctgggctttcgtggaacgcatctgcggcgtctgcacgggcacgcacgccatcgcggccctggccgcggtggaagacgcgctccagtacccggtgcccgtccaggcccgcctcatgcgcgacctggtcagcggggccctgggcatccaggaccacgtcatccatttttaccagctccaggccatggactgggtggacgtgatgtccgccctgaaggcggaccccgcggaaaccgccgccatcgccaaatccctttccgactggcccctgtcctccgccgcgtatttcgccggagtgcagaaaaagctgaaggactccatcgcctacgggcagtattccatcttcacgaacggctactggggccatccggcctacaagctgccgccggaagtgaatctgctgggcgtggcgcattacctccaggccctggtctggcagcgggacatgatcaagatccacaccattctgggcggcaagaacccgcacccgaacttcctggtcggcggcatggcctgcgccatcaacatgaacaatgaccaggccatcaaccagttctccctgagctacctgaagcagctggtgcaaacctgccacgatttcatccacaaagtatattatccggacattgtcgccatcgccggattttataaggactacgcccatatcggcgcgtccaaccccaactttttctgcaccggggctccgtctgaaatcaacgcgggcgctcccgccggcaaaggcatgatcaagcccggcgtgctgctgaacggggactacaggaacgtgctcccctttgaccaggacaagatcagggaattcgtcaccagctcctggtacaagtacacggaaggccgggacgcgggcctggccccgtacgacggggagacgaacgcggattacaacggccccaggccgccctacaagtggctctccgaccatccgcagtacacctgggtgaaagccccgcgctacgacggccacgcgatggccgtgggcccgaacgcccgcatgatgatcggctacgcccagggggtgcccgccatcgtggagcgggtggacgccgcctgcgacaagctggggctgccgcgcgacaacgccttcatgaactccacgctgggccgcgtgtacggccgctccctggacgccctgatcaacgtggacatgatggtgaaccagctccaggagatgacggaccgcatcaagaacggggaaaccgccaccttcaacccggaaaaatgggagccggaaacctggccctcctcctgcaagggcgtgggctgggtggaagcgccccgcggcagcctgagccactgggtacggattgaaaacggccagacggtgaattaccaggccgtggtgcccagcacctggaacagctccggccgcgacgcggaggggcagatggggccgtacgaatattccctggcccataccggaaaacacccgctggtggaccccacccgcccggtggaacccctgcgcaccgttcacagctatgacccgtgccaatcctgcgccgtccacttgtttgacgaagaaggggaggccattctgaccagacaggacccgtgaaaacgactcttatcgacaaagacctcaccctggcggtggaggacgccattccggccagcccggtttacacgccggaggaaatcctggccctggccgtgtgcgcctcccccaacggcagcacggacccgggggacctggccctgctccacgccgcgcgggaacggggcgtggccctgccctacgcccagcaggagaattcctgggaggctccctcccgggaaaggccgtacagcacggccatgctgaaagccgcggacaaggaggacgccgcccccttcatggtggcccgcggcagcctgaaggccctggaaaagctgtgtgaagtcagccatctggaaaaagagcgcatgaacaaggcttttgaggaatactccccctccggctttgaacccgtggccgtggccgtccaccggcccggcgcgccgtggcgcctgctgggcgtggtgcccatgcatgccatgagagacgtgcgccgcctttccatggccaaggccaatttccgctacttccacgtctgggactggccgctgcgcgtgctgcactggacctgggtgttctgcatcatcgggctggcttccaccggcatctgcattgcggaagggtggttcctgaaaatgggggacctgcacggggccttccagttcggcacgctccgcttcgtgcactacgcgctggggtggaccctggtggtggtgatgatgctgcgcttctcctgcttcttcatggcctccaacaagtaccagagcttccgggccctcttccccatctccaggcagcagtggaaggacctcttcaccacggcggtggactacgtgttcgcccgcagttatgacggcccccgctacatcggccacaatcctttacagcagtggacgtacacgggcgtctacgtcctgttcaccaccatggtggtgaccgggctggccctgtacgccctgtatgagccgcgccactggttctaccactggttcatgcccctgaacgacctgataggggttccgtacgtgcgcctggtgcacctgatcggcatgtggtgcttcatcatcttcgccatggttcacgtgtacctttccatcctctccggaaacgtggatcgggacggcaccatctcctccatgttcagcggagggcgctggctgcgtaagggcgtcaaattccgggatgaataacccttcccccgcatctgccatggaattggagccatacacggaagaactccggggctgccccgtgaaggggaacgcctatcccgtgctcgtgctgggcgtgggcaacccgctcatgggggatgacggcataggcgtggagcttgcccaccgtcttcaggaacgggactacggcccgctggtccatgtggaggagggaggcacgctgggaatgaccctgctgcccctgctggaagacgcggatacggtcatcctgctggacgccgtcaagacgggggccccgcccggaaccgtcgtcacgcgcagccgggacgaactcccccgccatttctccctcgtcatttccccgcaccagatcggcatgaaggaagtgctgggcgcggcccagctgtgcggaaccctgccgcgcatcatcacgctggtgggggtggaggccgggcatacggacttctgccagcccatgtccgcggaagtgcgggaggccgtgccgcaggcactggacctggtggaaaccctcatcgcccgcgccctggaggaataccaggcccggaaagacgcgcatgcatgaagtaggcatcatggagggggcgctggacatggcccggcggctcatggaaaagaacgggggaacccggctgatgcgcgtgcacatgaccatcggcagcctgagcggcgtggtgccggaagccctgcaatccgccttcctggccctgaaggacgcgtatgtcgcgcaggacgccgccctggacgtcacgtgggtggaggccctgtgccgctgcgacgcttgcagcgcggatttttccttcacggagcacggctatatctgccccggctgcggagaccccgccctggccatcctccggggacgggaactggaactgacccgggtggaatgggagtgaaccgcgcttttcccgtccggaagaaaataaggtgaatttacccgaacattttacccgcccggacggtctaataccattggcgcgcatccaccgcgcctcaaacgtcaaaccaactatgtaaccagcgtcatgagcaatatcaacccattcattctaacagggatgatgccgctttcagcctcatccatgaaccgcgtctcctacatgtgcccggtcaccatcagcaatgacgtggtgcagggccagacggacattcaggattccctcaccgttgattccggcggcaatctttacatcatcaacgcccccgtttacgtgggaggccccaaccagccggaccacgggcaccgcaccgcccacctggtcatccgtaacggaggcaccatgacgctcctgggcaacctgccggaccacatgaccgttttcctgggaaacaaggccaacggcagcctggagatcaacggcggccgccttctgatgggccagggccgcattcagggctccagagagcatgaaggcagaatcgccatgacggacggctggctcttcgcctcggaagtggacctgcccgccgagggctcggaactcgtcatcaagcacggcctgatgcgcatcaaaaaactttccggcagcgtatccacccacatttacggcggcgtgcttcacgtgaaggaggaagcccacgccagccgcatccatttgatagatgacggcgtgctgcttctgggcagcgtcaccagccagccttccgcggacgtcatggccggagcgggcatcaacttccgcggggacggcggcgcgctggtcatccgcgtgccccatccggaaaacgcgctgacgcgcacgcgggaggcggaacacgtctttgacgaactgctccggaggggcaagctcttccatgacagcaaacccatgaccagcttccagggcttccacatgagggaattcaccgggcatgacagcctgacgtacgccgcgctgcgcccctccgcccagctgcgcgcggaacagaaccaggtcacgcgcctgctccatacgttcatgtacggcggcagtgaaaaggacatgcccatctgaacctctccggaaaacggatcccattccgcaaaaaagccgccggcgcagaatgccggcggctttttcataaatgggcaagtggaaaaaacgttacttcaggaacgtaatcgtgaggggcgccacgtaatcgtaatccccgttcgccaccttgacggcagtgataatggcgaaaacaatccacgcgatgacgaccgcgggagccagcacgaagccgatcaggacaaaacataacaggaaggccgcaatcgaataaatcgcccaggaaatctgggcattcagaacattctttcctaccttgtccaccagggggttggcatccttccagaccagccagcagatcaggggcggaatgatgttcacgccggtggagaaaccgaaaaagacggataccagcggagaaaccgccgtaagagtggcctgggtcttgtcgggctgtttttcaggggcgggttcctgaaccggctcctggataatttgttgttcttcgtccataaaaaatgcaaggcgatgggaagcgggagggcgaacggaaacctcttccattcctttccgcctcagttaacccctttttcacatattccacccggtagtcaagcttccagaccgttcgttttccgaataaaaagcgttctcctgcaatcatccttgcctccgcggcgggaagtggctacacatgcagtccatgaccaacaccctgacgctgctcaccctctccgcctgcctgggggcctgtgttcccggcgcgccggaaatcctgcctcccgcttcttccgtcacccgccgtgaagctctggaaaccagccgggcctatacttccatggcctggcggggctctccccggaacgtccgccacgggacggacgaggacggcatccggatagacacgccggacgcctccgcagccggaggccatgccggcgcgtggtggcggcccggcgcgcgttccaccggcatgccgtacaaatggggcgggttcgacaccccgcggcagttcgccgaacgcctgaaggcggatgccgccaacgggggcgcccccgccgcggccggggacatgggcaccccggaaaagcaggccgcgggggatgccgccgtcagccgctttgccgccggggtggactgctccggcttcgtctcccgctgctggcgcctgtccaggccattttccacacgggagctccccgctctttccatttccctcccctcctgggatgagctgaaaacgggggacatcctgattgctccgggacgccatgtgctcctgttcatccgctgggagggagcggaaaaagacaggttcctgggcagtgaagccggccccctgccggtctggaagtgcgcggagcgcgttttcagccgccccatgctggagaacagcggctaccgccccatgaggtacaggggcatgcgggactgaaccgctgcgcggaactcccccatctccggcgctccagaatggcaccgggaacaggaacgccccgcaagtccggagactgcggggcgctggaaagagtgcggcgcatgcggccgcccggctccggaagaagccgcccgggattatccgggccgcgccgcttccggcacgggccgttacaacggctggacgttcagatcaaacaccttcccctggaaggaggagccgagcaccttcagcgggagaacgaaggtggagcgcacgcccttcgtgcggggttcaaagttttcgtccggattgcggaagctcttgagcaccatggtgcccgcaggcttgccgtcaatgaggagggtggttttttccggctctcccacaatttccaccttcaccttcttgccgacgggcagcttggcgccgaaggagaattccagagagtcatcccgccggaagcccatggtgccgtccttcatgacggcgaacagctccccttccgggccggaaagcagaacctgctccttcccttccggagcggcggaaagctcaagctccatggtgaggcggtagccgggccccagggcgggctggttcaactgctggggcagcttgcccggaaccacggagaagggcttggaatccttccacttgtggagggggttggtacggggggcttccccgatggccttgaccagctcccggtgctcttcaaaagaatccggagccttggccttcccccacatcttctgggccagcacgtccatggagccggaaataacgccccaaatgtcatagggggcatagccggagtgcttgaggtccgtctcatcattccagacggcaaaagccgcgccgatgagctggggatggccggaaggcagggtttcattcccgatgcggttgggaatccagttattataaagccccttgtggttcctgtccatgcggtaatagttggcgtagggcaccacgtacagggcgccgtcattggtattgatgacgtcgtaacccaggttcacggcctcccaggccctcatccatccggtactccagaggttcatttgaacgcccttgctcaccacgggggttttgccgggcttggtgctcaggctgccccagatgcggggcgtataaccgcgcttcagggcgtgcttcagcacggcgtccgcaaaatggcggtaatcctccttgttgccgtaaaactcgtccgcgcccacatgcaccaccttgctgccgaacaccgggcggcccagtttggggtctttcagcaaatactcgtcaaataccttgcccaccaggctgatcgtctccgggttggcggcgtccagcatctcgctgcggcgcttttcatggttcatggggcccttgtaaatgaggtccgggcgcaggcgggtgaaggaaagcgcgtgaccgggagtgtcaatctccggaacgatgctgatgccgcggcgttcggcgtaatccaccagatccgcaaactccttcttggtgtagaaaaggtccttcgccgtaagaggaacgccgtccttgcccttcatgttggattccaggcggaaggcggcatagagctccttgaacggatcgcggcccttgtccacatacatttcatggaaaatgaagttattgttgatgaccaggtgcagatcattcatcttgtaccaggccatggtgcggatcacgtccctgaggtagctgaggggatagggcgtacgcgcaatatcaagcatgaagccgcgcagctcatagcgcgggaaatccactgccgtgccgcagggaacgctgccgggggtctggcgcagcatctgcagcagcgtgcgcgtgccccagaacagcccggtgggcgtagccgcgccaatgcggacgccgtccctggtcacctggagcctgtacccctccttgcccaggttgccgcctttcagcagggaaaaggaaatatccgccttcgcgccgggcgggacaagcttgaccttcttccccgccacgtcttccagatcagccgtgaatatctgcgccagctctttttccgggcaggctacggaaaccgtgttccccagcttgtactcgccctggccgcccttccattgcaggatttccggaatgatacgcggcttgggattgccctgggcggcgtccggggcctgcagcatgatttcataatccttgctgatggcttccttgccgtccttggtcaccttgaagctgacgttgacgggggtgtctgaaataacgggggctatctttcccttgctgttaacaagctgctcatagtcggcccccaggaatttgatctgggctccggaggcgcttggcatcggcagttgtttcgcgcccgctttcaccggagggatggtgagggaatccgcaatctgcttggcgtcctgccccatcaagggagatgcggcaaaagcggcgatcatcaggaataggttcttcttcatgttatcgtgtcgtttcagggaaaaggaggatctgattcgtgccaagaactacgcgcccgccgtccttttcttgcagggaaaggggaaaaagcgggtgaattctccttcgttccgccgtccgggcaggcattccgccgggcggattgccgcgcgtcaggtttcatgaaggaaaaccgccgggcccgggaggaccggccaatcttgttcaggcaagttattatctcaaacatcccgttcttggcgagattaaaaaacaggcacgctccggacgcgggaatgcgcccggaaggtaaacgccctgccggacaaaaaaaggggccggacctccaatcaggaaatccggccccggacagggggaaaagggaaggagaaatcaggcgcggatgtcgatcacctccccggcggggaagcgcaccttggcctcgcgggcgtaatcgtcgtccttcgcgcggtagcccagcgccacgctcaccacggagcggtacggcgtgccgtccaggcccagaatctcatcatacttatcgcggtccatgccgccgatggtgcaggaatccacccgcagggcggcggccgcgctgagcaggaagcctgcggcaatgtacacctggcaatccagccaggtgtgcattttttccggagtcagggattttacatagccagtatagaaatcagcggaggaagccagcttttccgcggacgggtggcgcgtgaactcaatctgggccaggtagcggtccacgtcccgctgggtggccgtcctgcgggcgcaaagcaccacgtaatgggagcagtcctccacctgggactggttccaggagacttcccgcaggcgcgcctttaattccttgttcgtcaccaccacaaacttccagagctgaagacccagggaagacgggctgaggcgcaggctttccgccagcgcatgccaggtgggtttctcaatgcgggcttcggggtcaaacttcttgcaggcgtaacgccattcaagaccgtcaatgtactgttccggagagatcataaaaggtgagacaggaaaaacggcgaaactgtttaaagtacttccttcaaaacttcaatgcagcgggcattttccgcgggggtgcctatgctgatgcggatccactccggcagcccgtagccgtcctgcgcgcggacgatcacgcccctggccagcatgtcctggaacaccttcctgccctgccccaccttcaccaggatgaaattgccctggctgggaatccattccagccccatgtcccggaaagcctgttcgtaaaaacgcatgccctcggcattgttctccacggtgcggcgcacgtgctcccggtcttccagggcggccagggccgcctcctgcgccagcacgtgcaggttgaacggcgcgcgcgccttgtgcagcatgctgcacacgtgttccggggcaatgccgtagcccacgcgcaggcccgccaggccgtaagccttggagaaggtgcggagaacaatcacgttgcggccttcccgcacgaacttgagggtatccggcggattgtcggaaaactcccggtacgcctcgtcaaagcataccagcacgtgttccggcaccttcgccatgaaatcgtcaatctcctgctgggtcacgacggtgcccacgggattggtgggattcgtaatgaacacgatgcgcgtgttgtccgtaatggcatccaggaagccgttcagatcgtgcgtccagtccggcttgttgggcacttccacgtacgtggcgccgaacagcttggacatgatggggtacatggaaaaggcgtgcctggcggccactacctccgcccggggattcagcagggcatggcacatcagctcaatcacctcgctgctgcccgtgcccaccaccgtctggccaaactccacgccgcagaactccgcaatggcggagcgcaggcggaaggccgcgccgtccggataaatgttcacgcctgccgccgcgcgggcaatggcctccaccgccttgggggacggccccagcgggttctcattggacgccagtttcacaatatcatggggatccaggcccagttcccgggccgtctcctcaatgggcttgcccggctggtaagccaccaattccagcacatgccggtttgcgaaactctcaatactcatagcggcggaatgttaccgccattccccacttctggcaatacggatttccatccggagcggaccttaaaaacatgcctgtcattcagcctcatccacgctgcgggaagcggcggaatttctttcacccccggaaaggccttcctttccaaccggcttaatcctcttcccgccgccaaaataaacgtatccatggcgcgaacagccggaagcaggctttttaatgccgcggcgggcaagtattgcccggaaggataaaaattagacttccgctctttggacagtttcccaaacatggaaagggtggttcaaagcagatgtccctccggaaaggtcgtgccaaatccatgcccttgtggacgacaatggaagtttcaccatcaagcaagtttggaatgtccgcctgccctttccttccgtctttccgcgcatcccctgccctataaaaagcaacccggtttaacggccttattccgggacgtgcctgccgggcatttcttccctcgcccggcgggtcatggcggcgatcagctccgtttttccctccgtataggcatcccggttgaattcgaacttctctttcagggaacgcttgagggcggcgtacctttccgcctcatccggatgcgcggccaggtaatcccggaagtacaattcatcccaatcccggcagggccgcacatgcagatggaacgcctgcccccggaagccgtccgcggcatagcccttcaccagaaccaggcgcatctgcgcttcgtcccggtgcatttcccggtagccgcacttttccagcaggggaagcgcttcaaaaacaaatgaatcgggccgcacttccagcagaatgtcaatggtgggtttggccgccaggcccggaacggacgtgctcccgaagtgggaaaggcggctgatgcgcgagaggggcaccaccgattccagcatctctttctccctccggtagatttccgcccactccggcctggattcgctcaggatgacgggaaacaagcgccagagttcttcaaggctcatggcggacagggcggcttcatccgaaacacggcgggacattcccggaagataagggagacgaagccgtgagtcaacctccccggcgtcctccccgccctgacgccggggaaccgcggacctttttgccattccctactttctccgcttgctgccgtcccgcggacggcagcgcagggcctggtacccggccacgacaaaggcgaaggtagtcaccgccagaaaagagcggaacagccacgccagaagttcccagtaaatctcctgagtcatgcggaaggttttttaccggaatccgggacgttgcccagatcttcccggagacgtttgacggcacaggcaatgagggtagccttatcaagctggcagcgctccacgttcagggcgtccgcttccgcatcccggaaaaaatggacggataacggcatttttcccttgatttgaatttttttctgactctttttcttatttcccgtcttcataaaaatccttcttttggtgcaataagggcttcaataacccgcttacgatgcaataatgcacctgaaacggtattttagtcaacgaaaatataccgttaaaatgatattatgcaaaaaaggttgaaaaatcgcaccattttcgttacaaagatatgcatgagtgagaatcaggatgaactcaaagtgcagatcaaggcttggctgaaacagcagaacatctcccgcaatgattttgcggaggaatgcttcgtgtctcccaacacggtccgcaactggcttgccaaggtagccattcccaaagacaaggaagctctcatccggctcatgatggaaaagacggaaagggagaaaaaactgaaggaggcggcaagagcccattggaaacccttcgccgtcatgctgagcgccgaggattacaaactcatcgaagaagccgccagaagagacaacatgacggtggaggaatgggcggaagccaccctgatcaaggacgcccagaagaggatgaagaattattacgacgacgaaagcagcctcccgaacgacatccctctggcagcggaaattccggaggagtacggcgctcccaggccttcctcctcttccagttcctcattctccgaaccttcttctccccgccgcaagcctcggcaataacccatggcggatatggcaggcgcgccccgtgcagggacaccgccctcccgctgagcccctcttcggctgaaatcccccggctccctgcggttccgggggattttcctgtcaaggccccgggaacggctcaaacacttgcggcaactgaaaccgggatggggttccgcaaacgatttaaaatacgcgtatccgcagggcacgatggggatattaattaccgcaggggcttgcgccgctcccgtccgctcttttttcttgcctgacgtgttagaggggttctatcatattgaccatgagacaactactctgcctgctgttcatttccgccttctggcttccgctttccgcccgtgcggaggcggctccgccggccgttccctccattgccgtcaggatggtgcatccggacagcctggagctggaccgggaaggaaaaccggttccggaaggatacacgccttatgtgtatgaattccgcgaccgccacggaaagatgcagcgggaacgtctgttcctgaaagatgaaccggtcattacggaggcggaggtggaacgggcaggcgtcgatccgagcagaccggagcatctcaacatcaccctgaacacgccgggagggagggccatgaaaacggctacatccgccatgaggctgggacatgacaggctggctgtcgtcgttcagggaaaagtcaattcggccccggtggttcaggccattatttcccgtgcttttgaaatttccggactggacggggagaatgaagccgccaacttggcggaactgctcaaccaccgggccgccacggggaaaaccacccctttcattccgcgggatctggccctgtacgtcatccatccggagaacgcccggctggtggaagaagggacgctttccgtaccgggctaccggctctggagccgcccgggcgcggaggaagaaaaagacgcggagaaggaatacctgtttctggggaacgcccccatcgtcaccggggattacgcccagtccgcacgccccaatctggattatccagggcatctggacatcgtttggaatgaagaagcgtacaggaacctggaacaggcctgcgccgccctccggcccggcaaggacagaatggccgtggtcctgcgcggcgccatcctgtctacgcccgtattccataaaatgccttcccacgccaccctcattcccgtgccgggagatgaccgccagctggatgccctctgcgcggccatcaatacccagtttccgccgctcacggaacaacagcagaggaaggtgaaaaagaagctggccgtttatcccgtgcatccccgcagcacggagctggaacagcggttcctcccggaactccggcaagggaaaaccattcatctgaaaagcgggttccgctccatcccctacacccgccctgatttcccggagcctgttccatcctgggcctttatccggccggaatccctgatcggcccggaggatatccggtacgcggcacgggagcaggacggcacgattacctgccaactgctgccccgtgcatgggaaaaaatgcatgccttcatggacgcaagccctgcgggaaccgtggccgtggcgattgtctttcaggggaaggttcaccagatgttcaagatcagagacagcttgctgcagatgtggggaatccccgtgatcacattcattcagcccatttccgtcatttacatcctcactccggaagaggaacggcgcatgcaccgggaattcctgtatcacgtcttcagggatatgctgtttcccgtcagcccgtggttctttaaaaactgcgttcctttccgtacgctgggcgaacagaagccttttttaatgattgattcgggcctgaaccgcccctgatttttttgctcgaaccgggggcggcgctccgctatattgcctcccgttatggcaacaccggattttcattaccaggatccttttcccattgaaaaggacgacacccagtaccgcctcatcacgtccgactacgtgagcgtgggtgactttgaaggacaccccatgctgaaggtggaaccagagggcctgcgcctgctggccgcggaagccttccatgacgtggcctttttcctgcgccccgcccacctgaagcaggtggccgccattctggacgacccggaagccagcgccaatgacaagagcgtggccctgacgatgctccgcaacgcggaagtggcttccgccggaatcctgcccttctgccaggacacgggcaccgccaccatcgtgggcaagaagggccagcaggtctggaccggctgcgatgactgcgaacagctttcccacggcgtttacgacgcctacacccagaacaacctgcgctattcccagaccgtggcgctggacatgtatacggaaaagaacaccggcaccaacctgcccgcccagattgacattgaagccgtggaaggcatgaagtactccttcctcttcgtcgccaagggcggcggctccgccaacaagacctacctttaccaggaaacgaaggccctgctgaatccggccacgctgaagaagttcctggtggagaagatgagcacgctgggcacggcggcctgcccgccctaccacatcgccttcgtcatcggcggcacatccgcggaaaagtgcctgaaaaccgtgaagatggcttccaccaagtattacgacaaccttccgaccacgggcaacgagtacggacgcgccttccgcgacctggagctggaaaaggaactgcatgaggaagcctgcaagctgggcctgggcgcccagttcggcggcaagtggtacgcgctggacgtgcgcgtcatccgcctgccccgccacggagcctcctgcccggtgggcctgggcgtctcctgctccgcggaccgcaacgcgaaggccaagatcacgccggaaggcatcttcattgaacagctggaaaccaatcccggacagtacattccggaagcgctgcgcatgacctccagcgaggccgtctccattgacctgaaccgcccgatgaaggaagtgctggcggaactgagcaagtaccccgtcaccacgcgcctgagcctgaacggcaccatcatcgtggcgcgcgacatcgcccacgccaagctgaaggaacgcctggaaaagggtgaaggcatgccccagtacatgaaggaccatcccgtgtactacgcgggtccggccaagaccccggaagggtatccctccggctccttcggccccaccaccgcggggcgcatggattcctacgtggacctgttccaggaaaacggcggctccatgatcatgatcgccaagggcaaccgcagccagcaggtgacggacgcctgccagaagcacggcggcttttacctgggttccatcggcggtcccgccgccatcctggccaagaataacatcaggaaggtggaactgctggaatacccggaactgggcatggaagccatctggaagattgaggtggaggacttccccgccttcattctggtggacgacaagggcaacgatttcttcgcaaagatccgcgaaggctgggcctgcgccggctgcgcccattaagccgcccggacagagcgccggattttttctccctgttccgccatgccgcgcggaacagggattttttatggcccctttacgggaaaactcgtttcatctcccctcctttttcccttgagcttttgggtagattcttccgaatatccccggcctgccgtttcaagcattcattaaatccggaaggaggaagaagcgcagatataaacaggtggaatccgccacccgttacagggagaatctccagcctttaaaaaaccgtttgtaagacattgccggaagtttttcccgcttgactatttatggaaatttttcatagtagttccggttagtatcatacaaatcacatttacctctaataaatcgccccgtcctgctgctacaggacggggcttttcgttagctgaacattacaatgagtaactcaatcagcctggttagtatgatacagtcattcacatggtacacctccttttcttaatccgggatcaacccggcgcggagattttacagaaaaacaatattatttcaagattttcaatttcagcaaatttccccgtcccggagagtattcctgtctttccgcgccattctcccatgcccggggcgggcgtttcagggaaagaacggcaatagagcacgtccattccaacaactccggagatggccgccaggctggcagggcaacgcggttcccccattgcagcaagcgccacggaaaagcccccgtccacgggaaggccggggaacacgccggatacacagtgcgcccgcttcacgcaagcagggaataaagcagcatcagcgccagattggcgccagcggccagcaacagcctgcccggcttcaaataccgtgcctttcccaggaaaaccgtcagcaccgtaaagacggcatacagggatatccacatcaggaagaattccgccagattccttccgttcccgagactgtccaagggcattttccaaccggaaaacaggaggggcaacaccggaagcacggcataaacggcatatacccagttcctcaccaccggcctgaagacgactgtcagcgggtcccggccaaagaggatattcctggaatggacgctctgcaccttttccttccgcagggcgaaggggagatagaggaggagaagcatcggcagcagaacaggccaggcgtaccagaccgtggccgcccccagcatgaagacgaagaaggcggtaaaaatgatgggaatgcccgccatgagcaggaaaaggaggcttgtcctgcgatccgatttttctcccattttcaggaaggaccatgagaggtaggccatagggcaagagtctggttttccgaaggttgccagaaatcacagccgcccgcaaggaaaagccgcccacggccggcagaatccgttacgaaccccgttccgcacacagagaaccggaccgcaggcagactctgattgggattgccccccgccccttcccacgctatcctgccttcatggcctaccgaatctgcaaatccattgaactggaaagcgggcaccttctgtccaagcaccccggcaactgcaaattcccccatggccatacgcgttccgtggagatggtgttccgggcggatacgctggacgccaacgacatggtggtggatttcaaggccatcaagcagatgatgggggattttctacagcagtttgaccattccctgtgcgtgaatacggatgaccccaattacgccgccttcgtggccgcgtacggggagcgcatcattccgtttgaccgggaggaccccaccagcgaggtaatggcccgcaccattttcaacttcgcccggcatgcgctggaaaaggccagggaaggttccggcgaataccccgtgcgggactgcgtcaccctggaacgcgtgcgcgtgtgggagaccagcagttcctgggcggaatacggagaatagaagcgcgggctattccttccgccacgcgttccgccgggaatgccgtttcaaccgcatttcacggttctcctttcaggacggttacccggttgccgggcaattcccccgcatacggtctgcggaggcttatcccttaaaaggggttgaatgagatcatgcgcttctgcgtccagtgcccgtacgtagaggaatacacatccgtaatttcacgggcccattcgtcaatggtgcgctggtggtgggcgtattttttaaaatccttggtatccacgcccagcagggcgctgtggtcttcctcgtagtccgcaaattcggaaacgatgcgtccgtcctcatcccgcaggcgtcccgccatggcgatgtggccctttttgatgaaccgcttgaccaggccgccccccttgatgccgctcaacgccgtgacaaaaatgccggctttggcgttcgtgggcgtgatggagatgatggcgagctccagcgtataggcccccctggttcccggaggcaccatctcaaagtgcggattttccgcaacttccttttccatgctggccgtgacgctcttccggaagtattccgccagacggtgcagggcatcaaatccttccgcggtatccggcctcacatccatgtgcaccgtatccaccggaacgacggccatcaggacttttttgccgtccacgccgtttaccttgtcattccagatttttttatcatcagcattccagtaggcatcaaacgggatatgggagtcgcaattttttacctgatgagtcacgaagcccgtccggggcacatgcttgaagttattggagcaagccactaccgccatgccgccaagcagcacgagcgccatcagggaagcgaggaacaggaaccggtgtttcttcataaacaggcaatcagctagagtcatttcatacatgacccggcatccgctgtcaataaaacccaggaaacaaaccgctcaagaccggaaaccggagccttcctcgttgaggcggcaggagagggaacgcagatttccggcatccccccggtcaggaagaagggaaacggaaggaaattcccccctccctgcatccggaaatatcccggcagggatgttgacaagggtggaaactttttatcagaagcgcacgggaggagacaggggcctccggcctgttttccctgttaccgttcgcgagaacggagccgtccgggaatgctaaaaggaaaaggcgcggcaggtccatgaaaacccttttaaaggaacggccacccgggaggggccttaatcctcttcatccatgggacggtatttcacggccagtttttccagaagcttcagggccagggcggcacggctgcggaaggatttatagtcccgcgggtcgcagtcgctccaggcccgttcggccagcgccagggcgcggggccacgccatgtattccaccagccccatgtcgtacaggtattccgtccagatattggcctggaggccgcgcaccttggaggcttcctccggggacagctccggcagttcatagccgtacacctgcctgagcggtatgaggcccccgatggccttcggttccgtgggagcagaagactggtagtagtcaaagtagaagtgggagcacggggccaggatgacgggatgcccctttctggccgccgccgcggcaaagtcattgccgcgccatgccatgacgaagatgtgtttgtccgcctccagttcccctgcctcatcccagacgatggcgtcataaccgtctttccgcacgtagtccgcaatttgctgcaggaagtcccggctcagggccttgagatccgtctcgttcaggtctttcaaacggttctggcagtacctgcattttttccatgcttccgcggatacctcgtcatggcccagatgaatgggggagccgggcgggaagacggccttgagttcatccaccacgtcttttacgaagcggagcgtttccggacgccccatgcagacggcgtcccggccttttttcccttccacgggaaagtccaccccgtcgcagatcaagtccccgtaggcatgcatggccgcataggaatggccgggaaggtctatttccggcacaatggtgacctggcggctgcgggcataggcaatgatttccctcatctgctcccgggtgtaaaaacctccgtaggtggcctccgggtcatgctcctgaatggccagcttcacttcctgccagttccattctccattggccagcggcacgcgccacgcgctcatggaggtgagaagggggtatttcctgatttccatccgccagccggggccgtccgtcaggtgcaggtgaagccggttgagcttgaagagggacatggtgtcaatcatgcgcttgacctccgccatggtgaaaaagtggcgggatacgtccagcatgatgccccgccattcaaaacgggggacgtccctgatggagaagacgggcacggagaaaccgtcctccgtccggttggcattcagtacctgcaccatgctctgccacgcgtagaagaggcctgcggacgcccccgctttcagatgcagcacgccccggcccccctgcccggcgtccaggcgcgcctcatacccttccccggttcccgcggggtttccttccaccgaacaaaccacgtccgccgaatccctgtcacgggtcatggagaggccggacaggacgccctgggcgttaagcacattcaggatggcttccactgcgggagcatccttttcaggagcatagaccgccagccgcagcggaagatgcgccacggcggaccggtcggacgtgcatgcggaaggagcggggagcaacacatcctccgccgggagcatttccgccatgccggcgttcaggaacccggccagagccagccacgccgccatccggtaaaaacgccccttattcatcattccgggagtacgggaagcagcattccgttctttcaataaaagaggagcgccgcaggcccctgcgggaacggaagataaaggcgggcggcggtgaattctttttcccaagaacaggacgtcctgacggatgtattcatttcagccggcgcaagggtttgcggcgctccccgccctttctttaaaaaaggcgcggccatgttcgccgcgccccgggttaaatccgtttttgcgcctatttgcgaccgccaaagagaccgcccaggcctcctccaagcccaccaaggcctttcaggccgccaagaccgccgcccatgccgggaaggccgggcatcttgccccctttccccttcatggcgcccatctgtttcatcatggcgcccatcttgcccttgccggacatcatcttgcgcatttcggaaaagttcttgatgagcttgttcacctccatcagggagcggccgcagccggcggcaatgcggcggcggcgggacgggttcagcaggttgggattgctcctttccttggccgtcatggagagcacgatggcttccatgtgcttcatcctcttgggatctagcgcgccgtccggaagctgcttcttgattttgccgaagccggggagcaggctcagcaggccttccagcggccccaggttctgcatcatcttcatctggtccaggaagtcgttaaagtcaaatttgccggacatcatgcggtccatggatttggccgcctgttcctcgtcaatgcgggcggcggcatgctccaccagccccacgatgtcacccatgcccaggatgcggtccgccatgcggccggggacgaaggggccgaactggtccagcttttccccctcgccggagaatttgatgggcttgcccgtcacggaacgcatggagagggcagcgcccccgcgggcgtccccgtccagcttggtcaggacgatgcccgtgacgttcacggcccggtcaaaggtctgggccacgttcacggcctgctggcccgtggcggcgtccaccaccagaagggtttcccgcggggagaggaaggcgtgcaggtggcgcagctcgtcaatcagggcttcatccacttcctggcggcccgccgtgtcaaagatcatgacggtcccgttctgggtccgggcccattccagggcctcacgcgccacggccaccacgtcccggctgccgggagcgggcttgtacacgggcacttctatctgttccgccagcgtagccagctggtccacggcggcggggcgcaccaggtcgcaggccaccagcagggggcggcgcccctcgtttttcaggcgcagggccagcttcgcgctggtggtggttttgcccgcgccgttcaggcccactaccatgattctggcggggtccgtcaggtccagtcccacggcgtctccgcccagcagggcggcgatttcatcacggaagattttgacgatctgttccccgggcttgatggatttgagcacttcctgccccatggcccgctccttcacgcggccgatgaattcccgggccacgccaaactccacgtccgcttccagcaaggccagccggatgtcccgcagggcgtccgcaatgttcttttcagaaatcttgcccaggccccgcagcttccggaacgtgttatccagtttatcagctaaaagtgaaaacataatcgtatgatgcgccagactgtgccacatttcccgccccccgtcaacaagtgcgccctgcatgggacatgatgcttgacttgccgggggcttccccccatcttttcccgcatggcaccttttgacctgaaagaggaaattttacgcctgaaaaaagaacgcaacgccatcattctggcgcacagctaccagaccggggacatccaggacatggccgactacgtgggcgattccctggggctggcctacaaggcgcagcatacggattgcgacgtgatcgccttctgcggcgtccatttcatggcggagaccgccaagatcctcaatccggacaaaaccgtcatcctgccggacgcggacgccggctgctccctggaagcctcctgcgacgccggggaactggaagccttcctgaaagagaacgccgacaggaattattacgtggtggcgtatgtgaactgctccatcggcgtgaaggctctggcggacgtgatcgtcacctccgggaacgccgtgaagattgtctcccaggctccggaggaccgtcccatcctgttcgtgccggaccagaacctgggcgcctgggtaggccgccagctgggacgccccatggagttgtggaacggggcctgccacgtgcacatggagtttacgcgggaccagattctggccctgaaggagaagcaccccggcgcgctggtggtggcccacccggaatgcacggaggccgtgcgcctgctggctgaccacatctgctccacggagaagatgattccctactgcacggaaagcccggcttcatccttcatcatcgtcacggaatccggcatcctgcaccgcctgcgcaagctggtgccgggcaaggagttcattcccgcccccacggagcagtgctcctgcagcacctgcccgtacatgaagatgaacacgctggaaaaactgtacctggctctccgggacctttcccccgccgtggaactgccggaagacctgcgcaagagggcggaagccccgctgctgcgcatgctggagcagtccaaatcctgacctgtttcccccccgcatgatacgcctttccgaccacatcgcggccgccggcggctggctttccctggaagccttcatgcagctggccctgcaccacccgcaggaggggtattactccaccgccattgagaacatcgggagccgcggggatttttccaccacccccacgctgtcccccattctggcaaaggccgtcgccgcacgctggaaggaggcctgcgcccgctgcggcaggcggctgcccctgctggagataggcgccggttccggagccctggccgtcaaggtcctggaacagctgggcttctggaaccgcctgaatacggattacgtgattgtggagtcctccccccggctgcgcgaattccagcaccttctgctggggagccaggccaagatttactccaccatggaaaaggcgctgaagcactgcggcggaaaagccttcattttctccaacgagctggtggacgccttcccggcccgcgtgtttgagtacacggaagagggctggcgggaagtggggcttaccgtaaaggacggagccgtgcgggaggaactgcgccccgtccgtcaacagccgcttttttcccacatgctggaatatgattcccagccggggcagcgtctggagattcacgattcctacgcgcgctggttcaccgggtggctgcccctctggaacatgggcgtcatgacggtcatcgactacggggacgaaatggagcggctttactaccgccgcccccagggttccctgcgcgggtataaaagccaccaggtgctgaccggggaggaactgtaccggcaccccggcctcacggacctgacctgcgacgtgaattttacggaccttctggagctttcccgcaactgcctgggggatacggtcaccctgatgacccagcgggattacctgctcccctacgcggagaacacgccgcaggacgccttcctgacggacgaacacggcgcaggaggccatttccacgtgctgatccaggaacggctgtaatgttcgtcattcctttcccgaatttgcatcgttaaacttcctgtgtgcccctatgttcgatctttccgattttttgaaagatattttatcctcattgattggacctcccgggagtggcagggatgacgaacaatcccggaggcgtcaatggacgggtattattctcctggcaatcgtcatggaatctctgctcttatggatacatatgaacagcatggcggctcttgttctcggcatggtctttgccttttggctgatcgcttatattattgtccaatccctccggaatcatgactataaataaaattgccgtggttatgcctaggggaagtttagatacgaaggccgggaggccttcgttcccaggcgaccgcttctcatgcatgtcattggaattgtcccatcccggatttcctatcatgaccgcgcttttgggaacaagggcctcccggcccttgtaaataagttagtccataacatcccggccttccgataacaaagctcatccaccaacttcctccttccaactcctttcacaaaaccatgtttgaccttctttcctttctgctggatatcccgtcccttcgagcagagttttccccgcgcgccagacatgacggggaatccccgtactggcgtttcatgggcatccttcttctgggagcggacctggccgtgctgttgttaggagacatcacggaaagcatgccggctcttttagccactattgccctcagcctctggctagtcgcgcaccttgtcatccgctcctcccggcacagggataaccgaggataaagcatcctccctccttcccaaaagcacccttcacgccaacattgcagggaaaccgggtctaccctctatttccactttcagggcagtaaaaacatgatgcattcattctcaaagcatcctgtatttccttccatgggcctgtcataaaaattttctcctttttgaacgcaagcccccacccgggactctaacctgcatcagtaacaaaccgggcggcgggaggtagagagaccgccacccattatggggagttctgagtttcataggtaatatagttggataaaaacccgcacgggggaaaccctgtgcgggtttattcatccccgctccggggcacccggaaaacagggccggaacaggccgcagaaaatcatggctgaaccaaattaaggcttgagagttgaaggcatctcgctaatctggcttcagcaagaatcatctgttatcatggtcaccacgaacgaaccgaatgtttacgaaacaggagtactggactccaacgcggaaggcaattttgtctacaccaccctggacgccgccatcaactggattcgtaaaaattccctctggcccatgccgatgggactttcctgctgcgccatcgagttcatggccgtggcctgctcccggtatgacctttcccgcttcggttcggaagtaacgcgcttttccccccgccaggcggacgtgatgatcgtggccggcaccgtcacctacaagatggccctggccgtccgccgcatctgggaccagatgccggagcccaagtggtgcatcgccatgggcgcgtgcgcctccaccggcggcatgttccgctcctattccgtgctccagggcgtggacaagattattcccgtggacgtttacatttccggctgccctccccgcccggaggccatcctggaagccctgcttaccctccgcaagaagctggatacccagcagcccgcacgcacgttcttcaagaaggaggaaccgcgcgaagccaacgcccccgtgccggtcgagacggaaatgcctctcgaataaaccttttccgaccgttttactccgttccatcttttaccatttcttctccatgccttctctagaatcacagatcaagaccgccgcagacaacgcccagaaccgctttgggaaagacgtcatcacggaccgctacgagttccggggcgacatcacgctgaccgtcgcgcgccatgccgtggcggacgtagtccgctggctgcgggattccgccggatttgacatgatggtgaacctctgctccgtggacaacatgggggaaagcccccgctttgaagtcaattatacgctgacgcaggcggaaacgggcgtgaacctgagcctcaagacgaaggtggacgacggagaggaagtgcccagcgtcacggaaatcttccagtccgccaactggcacgagcgtgaagtatgggacctgatgggcatcaagttctccggccacccggatttgcgccgcattttgatgtgggaaggctatccttatttccccctgcgaaaggatttccccgttcagggcgtacctactgaactgccgggcgtcgcctttacggaggcggcccccacccagggagcgccgttcgccacggaacagggccgctgccccagcgcctgccgcgaaccccggtcccataaattctagcccattttccagccccgcaaggcggggtccctcccatgacccgactccccctcatcctgcccgtatgtatcatcagcctgctcagcggctgccaggacgccaacccggcagagcgggaatggaaggaccagttatataaaaacctggcgatcgtgggagccagaaactggattgtcattgcggagtcctccttcccggcctatacgggagccggcatcaagaccatggtctccgacaagacgtccgatgaagtgcttctggacgtgctgaacatgctggaggaggaagcccacgtggtgccccgcatcatgatcagctcggaattgcgcagcgttacggaggattacgcccccggcatcaagcgctaccgcaataatatcaataaaatgcttccgggacgccagcattttgaattgatgagccgcacgatcaattccctgatcgaagacgccgccaagcagttcaacgtgctggtcatcaagaccaagacatccctcccctattccaacatttacattgaactggattccgggtactggaattcggaatcggagacggcgctccgcaaatccctggaggccaaggatgcggtcaaccgccgcgcggcccaggacagggtgctggacgtgccccttacgccgggagccgcccctgcgccgcaggaccgcaaggagaatcccccggcgcccggcgcgcccgcatccacccccacggacaacctgccggagcttccgcgggaaaaccgccagccggcctcccccgccgggaaccaggctcccggtgtgcccccgccgcccatcaaggatccgctgggagggaaaaccgccattgccagattttcatgaaccatcatatggacaaggccacagaagaacgcctccgcgtggaggcatgggtaggggacgccattctggcgctgtacgtcagggaatggattctggcggaggaaggagcgatcaacggaaagcttttcatcgaattcaccagcaatgatttcctgcgccgcaccggcaacgccacaggcgtggaagcggaaataggccgcaccttcaaggcaggaggcctggaagcggcctatgcctggattgagcatcatttgaagccccgcatggaggaacgctggcacaccctgcgcagaaaagccctccggtagcctgccgccgccatgtccgcctccggaacacccctgccctgggaccgggacaacggcccctgcgtgatggcgcccccccatttgagggattgggcggaagaggccgccgccttcctttcccgccggggcatggatggggtcacggcctttgccacgtccggttcttccggttcgccgcccaaagccattttattcacccggcgcgccctggacgtctgcgcgcgcggagccctggaacacctgcacgcggaatgcggggactggtgctgccccctgcccgtctggcacgtggggggcgccatgatttacctgcgcgcggccctggccgggaccgccgtccatgcgcttcacggcaggtggaatccccaggcctatgcggacctgatgaaaagctccggggcctgctggtcctccctggttcccacgcaggtggtggacctggtcaatctgcgcctccgcgcgccttccaccgccggatgcatcatcgtaggagggggggcgctggacatggagacgggcaggaaagcccgcgccctcggctggcccgtggtgcagagctacggcatgacggagtccggctcccagcttgccacggctttccccggcgatccgtaccacacggactgcctttccctgctgccccactgggaggcaaagacggatgaggacggcctcctgcgcttccagggggaaggcaagctgtgcggccgcctgatgacgcagcctcatggaggttttctgctggaacgggtggagccgcaggagtggtggagtacccgcgacctggtgcgcctggaggggcgtctgctgaccttcctgcgccgggcggacaggctcgtcaaagtcctgggggaactagtggacccggacgccgtccaggacgcgctgcgccgccgtgttccggaggcggtagtggaggccgttccgcacccgcgggccggaatggagctggtcgcctgcggtcccgccgctgtgccgctggaacgagcgtgccgcgaatggaatgcagctgctcccggcccccagcgcatccgggccgtcatggaaacgcccattcccctgacggtgatgggaaaactggaccgccgccagctgcgcgcgctgctggaggaatacccggaaaaactgcgggaggtttagtgaggcgcatcctcccggggctcttttttaaataatccggactggatggactggatggaccggatggacggaaggggcacaggggaggcttaatatcccttgtttactttgtccattccgcctttcccggctatcattatcctttgccttgggagctgccgcacacgtgcccggagcctcccgtcacagcttcatttgtcttctttaaaaaaagaacgtgacatcatcaataattaaacattcaggcacgtgaaaaacgcttgtagggcagaggtttttcctgttagaaaagagttgatccatgcgtgcccgtcttctgcttattccctttattttttccgttccggttcatgcccaggacgttccgtcccaggcaggggcaaatccacccgtgcaggtggagcaagtcccggtccgggacctttcccagctgcccatggacggcggctggacgtacggggaattgctcggcaaggctgccgcgggagacttccgggccaacatgctggccggggagtactggatggggctttattacctgaaccggggggacctgccgctggcctgcctggagcacatgcagcatttcttccgtgaagcggccgccaaatccggtcatccggctcccaagctcatgatgacggacccctacgggattttcgggattttcaaggcgcagtccatgcagccggagcacgcggaatggctggacgcctgccgcaagctggccgagaagggagacctggacgccgtcacggcgctgtacaccgttacggacctgccggaagccgagttgaagcgctacctcgcccctctggaaaagaaagccgcctccggcgaccaggacgcgcttgcccagctcgcctttatcagggtggactggctgaaggaagaccccggcaaggtgcttgagtccctggagaagcaccggaaaaacgccaaaccggttcttctggcccggatgggggaactggccctttccctgggcgggggaccctccggcaacgatccggacggcagggagtggcggaacatggccgtccagcccctttcccaggccgcggagaagggacacgcggcagccatgcgcctgctggcggagatgacgaagggtactgccgcggagcagtccggaaagcttctggcggaattgcgctccaggggagatttggaaaccctgctgggcgacctctccggctgcatgaaggagaaaaggggaaccgtggacggctacctgctccagaccctgtttgaccaggcccgcaagctgggcagcaataatgcctatgcctggtacgcccagttggtttccgaagcgaagccaccgcaggagcaggagctgcgcaaggccgccctggacctgctggcccttcatgacgaacggggcatgcccttcctgaaggaaccgctttcccttccccagaaaaagctcaaccagcttcccccctatgccaaaacgcacaaggagctggagctggcctcccagcttggagacgcggattccagcgtccagctgggcgagctgtggaaggaggaactggccaataccatggattccataggcaaagcccatgaagcgcaggagaacatgcgcacgtggtacaagcaggcggcggaagaaggacatcccctggccaagctgcgcctggcccagatggaaaacccggatttgatggacaagccggccgcggaacccgccagaacgctgctgaacgactgcctggcgaaagccgcctccggggacttcattacgctgagaggcatttccgaatacgtcacgccggaacagtgggaggagctgaccgccagcctccgcaaaaaagctcaggaaggggacgcccgcagccaggcggacctggcctacctgatgctgttcagctacaggagcgaggaatccggctatccggaagccctggcctgggcccggctttccgccggacagggggatccctgcggcatgtacgtgctgggccgcgcccttatttacagattcggcttggaaaaacgcatggcggaaggggattcctggatgttccggggggccctgaagggccatgtggacgcggcggacatgtggagctccaataatgaaaaccttcagccttacagcgccatgatgcacggcctggcggcacggggccacattccctccctgctcttcctcgccaaccaggcggcctatccccaggatacggcggaaacggcggcgcagaacgccagccggaatacctcccattccgcctaccagcaggtcaagctgagcttgaatagcgaggaaggaaacaccccgccgtggctccgcaagccggggcagaaggataacgcggaagatacgctgacggacgccggagccgtccccccctggatgacgccgtccggcagggaacgccaggcccctgccccgaaaaccatcaatccggaagccgtgaagttctgggaacaggccgtggaactcggcagcctgaccgccctggacgaattggccaattattatgaaaccgtggccgggaacgtgcaggaccctgcggaacggcagcagctgctggcctccgccatgacggcggccaccgcgctggtgaagaaggaggacgtgcgcggcctcaagaggctggcccggtattacgagcaggggatcggcgtgcagccgaacaaggagcttcacaaggattatgtgctgaaagccgccgcaaccaaagacccggaagccctggtggaaaaggcgcgcctgctcatcaagggagaggatatggagccggacccgaaaacggcgatggacatcctgaccaagctggaacagaaccagacgcatgccgtgcccggcatgtatttcctgctcggctacctgcatgaggaagggctcggcactccgcaggatatggctctggcctaccagttttacattaagggagcggaacaggacgacgccaagtccatgaacaacctgggctccatgtacgaacgcggaacgggcgtggccaaggacctggcggaagccaggaagtggtatgaacaggcggcggagctggggaatgaagacgcccgcgccaatgtggagcgggtgaaggaaaagattaagaagaaggcggggaaataggctgcgcctttgcccggtgaatgccccggaatgggtttgcgggagcagggagcgccgcaggcctctgcggccggctgggaatgaggtgaggaaagcgagcgcgattcttcaacgggacattccctgtttttaagatgaggaggcccattcaaggttcgtgcattctgccatgcgtggctgttcgggccgcccgcatgggtatatggcgctccctgttccggccatgccgtgccgggacggattttgctttccaaggcgtaagcaggggcggaaaggcacctccacaaggagggctgctgaagttattcccgtgtcactttcaggcgcaggaagcgccgcttcatggcgctgtcctgcacgggctccgcatcccggaattcggcagacgtttttccggcggtttccacttcccccagggaagtccagttaaccaggtccggggagacttccacttcatgctttacctccgccgcctgaggatttaccggccaccgcaacaccagatgcctgcttccttcaacgccttcttccacggataccttcgtcacgcttccgcagggtttcagcgggtccaggcccgtggcgtatttcatcaggttggtgacgccgtccccggcgggagcggcatccgcagccgtccggtccgccgtggcgtccggcgggaaggagtcctgcacccacttgtcatagcccgccaggtcagccccggcctgcgtgacggtgacggcgcattcctgcttgtcggaagcgcggaacaccaccgttccggaccgtccggcggcagatttgttttccgacgccgtcaggatgaccgtggtccggccgatgccggaagcggcggaaacggaaatccattccggggagtccgccaccacccagcccagggcttcctcttccatttgaatttccacatccaccgcccctcctgcggcgggaacggacgcccccacccgggacaagccgaacggtgaagccgtgacgggaaacgacgtggaagacacgtagcggttggcggcgcgcaggagggaatggcggtcaaagtagttattgcttccggaagcgtccgccacgtccagccccatgtcccagtacatgaagccggccagcttctggtcgctgatgtatttggctttctttttgacggtggtgacgccgttgtaatggagcgtcagattgaggccggaataggaataaacggccgtgtcatgatcggggttgtccgcttccggacagttggcggctatgtccctgtagcccttgatgtagtcccccggctttttgccgtcaggcagcccggcggttccgggcgttccctggaatggggcgctcaggatgattttgttgtccggaaagccctgattccggaattttccgcaggcggaaaccatgctgttataagtattcacgtcaatggccggcccgtagttctggaaggtgaagtagtccacatactgcatgtacgcggcggggaaccagtaggcgacggtatgcagggagatggaaaagaacatgtccggattcgtctcccggatggcctgggccagttgcccgtagttggtccactttccatccccctggtacagccattcaaagtccaggtccacgccgtccagcggatattttttcaacaggtccctgatgccgtccgcaaacctctggcgggcggcggcagccggcagcatggcgctccacgcgcctccggcaatgcccaggcggatgcgcatgcctcccaccccttccgtcatgctgcgcagcgtgcggacatgttccgcccaggaggcggtatcacggccgaagacgtcgctgttcccccagtgagccacgatgagacggtcattccagttgggctgtacttccgtgcccaaacggttgacgggccgggccagatgccacacgcgcatgtcgtctattttccccttcaggttccggcccacgacggcattcggcgtgccgttcatttccccggcggcgaccgctgccgtctgcaggggggaaccgttgacgtaaaagatgcccgtccccgccgtggaattgcggatgaaggccagccagaagtattcatgaagggctacggcgggcaggtccgcctcccaggcagccgtggagcccgcctgcaggcgcgccttgtaatggccgtccgcccacgccagcgtcatggacacgctgtcgttttcaaacagggtgacgttctgctccccggcggatagagccaggttcacttcaatcgtgaacgcgttggcattgctgcccgccagcagtccgttgcccacgttcatataagcgtcttctccggtgaattccagaacgttcgtccgcgcgccgtcagcggggagaagctgcacgccccggctttccgtcacgtcgttgtccgggtaggaaaagctgatgtccccattggcggcggcggaagcggcgccgatgtaaatgatatccgagttattgatcatgtggggccgggacggccagttccacatgatatggctttcgcggacgtatccggtcaccaacatgtagcggaaggcggcgttgtccgtgacgatggagaattccgtgccggacggcgtcaccgcctggtacgggcgggtgaaggagctgcccgttttatccgcgaattccgtccacttggcgtcccggaagtctccgtccagccgccacagccccaccaggcggccatacctggggtgggccatgggcagcggccccgtcaggaaaaagtcgtccgctccggtccccagctccgcattccagaaccgcagttcgtcccgggcgcccttgaactgcgcagccagcaccaggcctgtccagccgtttttcatggaggccaggtaaggcgcggcaggagcggttcccgccaatgttccgtccacatacaggctgacgttttccgttcccagggccacggccacatggtgccaggttccggcggcgaagggctggccggaagcctccacggaggcgggagtttccgcattcccggattccagatgcagacggcctccgttcagggagagcgtggaagcccccagggaaagaatagcgccggaggcggcgtccccatccggcctgacccaaagttcgcaagtcatttcccccgttccggtccaggcatccgcaggcacgggaagcgccaccggggaggaaagaacggtcagcgccctgttgtggagcacgctgatgtgaccaagcataaataggcgaaagggtgaaacggtaattatccgaaagggtcaacccggaaaatttgaaagggtcaggagcgtgttgtgacacgtgtcactgcttggtggaaggggacggctcacgggtggagaagcgcatgagttccgcttcaaagtggagcggtatgtccccggtggggccgttgcggtttttggcgaggtgaaggctggcctgtcctgccagttgttgccgctgggcctcgtcgtccgcgtagtagtcagaacggtaaagcaagcctatcatgtccgcgtcctgctcaatggaaccggactcgcgcaggtcagacatgcggggaatccccacgctatttccggtgcgcgtttccggtccccggttaagctgggccaggacgatgaccggaaccttgagttccttcgccagggctttcagtcccgcggagatttccgcgacttcgcgttcccggctgttggcggcttgcttagacgtggaccgcatcagttgcaagtagtctacgccaatcgcggcaaggccccccaggtcccgcatgacgcggcgggccttggcccgtagctcgttgatggaaatggccgctgtatcgtcaatgaccagctgggccgccccaaggtccgatacggcccgcttgaaatgctgcatttccaactgggtgagagtaccgcgccggacaatctccccgcggcggacgccggaacgggcgaaaagaagacgctccgcaatctgcacggcgggcatttcgcacgagaaaagcaaggttggcttcttcttgttcagggcgatatgctctacgatattaagaagaaaagaagtcttccccatggaaggccgggccgcaatgacgaacatgtccccaggcttgaggccgttgctcttgcggtccagttggtcaaacccagtggaaagcccctgaatctgccccttgctggcaatgaactgttcaaagttggtgacggcctccttgacgatggaagccagactttggccgtccgcgtgattcttggcccgctcccggatttgaaagatatgagtctccacggcatccaggagggccgccacgtcctccggattgtcgaaggcctgcgtcatggacttggtggaagcgtcaataatggaccgcaagagggacttatcgcgcagggcgcggagataatgctcaaaataggccccggtggtggtgaacgtgtaaatgtccgccaagcctgcgctcccccccacggcgtccaactggcgcatgtccgcaagagcttgcgttatggaaataatatccaggggcaaattggcgttgtaccgggcgaggaacaaccgccacagtaactggtgggccgggatgtagaaaaaatcctccgtcacgccgaacgtgacggcctggggcatgtaagtcgccgggtccatgaccagcaaggccaggacgcccttttccgggccgggggcctggggaatgtccctgcacccggcaagaaccgcggaggaaggatcgtgaaaggaagtcatgaatcagtagcggcgaagggttggcggaaggtccgcggcggcccggcggaggttggacatgaccgtcgcgcgggcaagggaaggaaacggggaataacaggggttgcccgtcgtgaccacgtcatagcgtcgggcgtaggtggttgcttgggccttgcccccgcatccccaccgccatgcggtaaacaggccgtcccaccgctccggcgtccacgggtagtacatcttgctaccgtcgtagtggtccaggatgtagcggcctatcgtaatatcctccggacaaataggagaaagcggggcgtcctgcatgatggcggaaagctccctggcgatatggccccggagggcgtagcaacaaccgtaggcggcttgccgctcgtccccgcatgcggaaaaaggaatctccggattggtcagcatgggctgaagccaggagcggccaataagggccgtatccgggtcaaccttgaggacaatatcatcatccgccgcctcattggacaaaagcgcaagaatccccctgacggcctccgggccgttgaggttgcgcccgcggtcaaaatccgtcgtgacaatgtccgcaccataagaacaggcgtcccggtactgctccggcatgggtgagttggaatcatcagcgacaatgacgcgcgcctccgggaacgtccgactggcacacgctacacactccacggcctccgggccgttgcccgcataggtaggtatatatatagtagtcataaatcttactcggcggggccaggagcgaaaaacgtggcggcgtcaaaaatgcagtagacggcccccagcgcatactgcttaacggaaccgtcagccgccacatcagccagatgaaaggcgtattgcccgcggatgcccgttgcctccgtggacaggataaacggcgtcagtgtggccgtgctcggttgttccggggccagccacgcaccctcgaaaacgccccacacgtcaaattgcacgacaagccaaacggccccggaagtggcggaatgagtaacccagccgtcagcgtctccctccaatgcggacgtgcagaaacgcccctggaagtaaacgtggccgggccggacttttaccgccgtaattttgccagtgtcgtctttttcgactttgacgcggaatccttcgttgccgtcttccggcttggcctcctgcacgtcgctcttggcaagctcacagaacacggaacccaggatgaactggcgcacattgacgaacgaggcggggttgccgtcatcctggaaaggctccgcgcacgtgctgatcgtcgccaacttgaagctataggaaacgcttttttgtttttccccgtccttgtccaagccgtccgctctaagcggggtttcctcgcccttggaagttgccaaggaaaaacttttataattaccgtccccatcacatttgacattgagccagatgtccccctccttggcaggagcaatttcccaatttgccgaggcctccgaaacaagcttgccgaacgcataaatgttgccgcgccgcaagtatgcggcggacgggccaccgtccttattagccacggccagcacacgccacccctcgttacgggagccattggcgtaagtaatgcacccggtcaagtaagactcatacgtgatgtcatcaatagacgccccagacccggaattggcaccaacgaacttacccaagaccaaccgcacaaaccgtcctccgggctgtgaatctctcgtggaaatagtggcggatgtgatacagtcgtggctactgtctccccacaccaaatcaagatagacctttttgtttttttcagcttttaaggaaggataagggacaacgtccatcttgacgctgtttatcctgggaatgatgatccgtgtaccacccgcgtggacctccagaatcctaccaggattgaaataggccgtccaggtttgcccctccttggtcatggagcgtaaggaaaagccgcccttgttgtctgcataccgcccgcctgtccagcgtccagaattagggacagaaggaagcatcgtctgaaaatcggacgacctgtttagcgcgtcctggatggcatcgacactgttattccaattggccgccgtcagaacagtgcccttaaccttgtgggggagttgatacataaggctattttccgtagatttctgaatcccaattgccgccaatgtaggtaatttgcgtgaccgtcttgccgttgcggcgagtaacacccccacccgcgcaaagccagacctgaccctccggcaagttgggcaatccagcacgggaactaattttcccggaatcggaaatatccaccttgctggggatggtcagacgacactgggtataggcagccttgtagtgggtctgcccgcgcaaaattttagaaagtagggagggaggcactttgccgttaagcttatctgtcaagctgacgcctttttcatcagacaactgacctcccatcagggcgcacaggtctttcagggtggtgttgtccagggcatccacttcccccttgtaaagtttgcattgcgtgatcggttcgtcgaccagggccacggtgatttcactttcccggccgtcaaattcaaaagtggggtcatcaggattatccggattgtccgggtcaggcggctcttcccgcgtggctgaataagtcaaagtaacaaaatcaatcttgttgctttcgtgggtttcgatgctgatgtctgtcaggggtaatccttgcttgatggaatggatgcgtggaactaatgaacgagcctcacccttaggacacttaaaatactccttgagagattgggtgtcataagtctcattgtattgggacggcttccaccatgtcagcacgcctgacgggatacctaaaatgtcattgttcatattaacctaaaacagctagggcaccgccctgtttctgcagcagcttgtcgagtagttcgttggtctttttctgctcggcgagttgcttttgcggcacgttttcagcagagagcatcatccggccatatccaccaccgccaactttggcgagagacccagccagcacggtttcccaactgactttaattttgggggtatcatctacggttttttgacgctggggtttacccttggcggcatcttccttttctttggcagtccgtgccgcatcctgtttttcaagtgctcccgtgatgcggtcgctgatagatgccatctcggctttaatgccggaggtgtccatgacatccgccgcgctggaaaaaccttcggaaaaggcgtgttgtaaggcggaaaagttatcaacaacctgtccaagaatgcggtcgccgtaggaatcaataaatgacttggcggcccctcccgcctgagcggcaccctggtcagcgtccttttcaaactcgcgggaaagaccgtgcatccaggcggcttgcttccccatgccggggatgtactcaatcaagttggcgataccctccgacaataacgccaggataccattgacggctgtccgcatgacgccgacaaaagcgttacctaccatgccccaaaaagcagcatccgtcaaaatgtcaaagaccatgacgccagtcttgaaggcttggatgagaaattgagggatagcttggaaagctcccatcagggtgcgccataaaaaattcacgctctcctgaaaagcgagagtcaagcccagcttggcgagattccaagcctcaccctgtttgaacgcttcgatcatgaatcgcatggcataagcaatagtttcccctatttcacgagccttgaccgccatattttcgatagtgctgataccgtcgtccagcagaggcttgagtgcgtccatgatgggttctccaaattgggcacggacctcggaccaggcgtctcccagggttgaaagcttgccgttccacgtttgagactgcaattccatccctccggaaaagcgggccaaatcctccgcggccaccctccaaacctccgaccccttcttgccctccgcctggagcttctccagcttggtccgaacctccggagtgatggctccaacctcctggagacgctgcatagcttcccctacgggacggcctgaatccaatccggaatacaggcggccaatggtcacggcgagctcttcaaagggcgtgttagtaccggaggctacgtcgccaaccatcgttagcccctggcccgtggacagcgcgccatctgtcagggtttccagggtgcgcgaggctgcggcaatctccggtaactggaagggtgtgtgtgcggcaaaatccgccagttccatcatgcgatccttggcggccttggccgaaccaagaagcgggatgaatgcagtctgcatcgtctcccggtccgcggcttcaccaacggcagccttggcctccgtccaggcggcatgaagccctttgacggccagcgcggccccggccacagccgcgccgacaacagccatggacccgacgctgaacgtcttaaacccgccaagagacgaccgggcctcggtcaaaggtccgttaaaaccggagttgttcagccggagattatattctacgccgttgctcacgataggtttttcagaagttgaagctctaaaaaggaaaggcctccggaatccgcgccattgcgctgggcaatggcagcccttagacacagggcgcgggccacggcgatatccaggacggcgtcaaggctccatccatactcggagcagagcaaatccaccagggtcagccaccagcccacacccgaacaattcacggtttgcggcccgtcgccttcttctttttttccccgtcctccgctggggcaaaggacgccttaatgacatccgcaatcctgcgcccagcagcaggtagcatggaaggggaaatgctatccgcccatacgtgcaagtcctctttaaacgtcccggcatcaagggcagcggcaaaggcgtcacggtccgcgaacaaccacatgaacgcggttatttcgtaagcggagggctggccgccaagtgcgacaaaattcacgccagcagattcaaggagcagcaaatcccgcatggtcagggattgcctcttagcaaaagcatccttaacaacatccgggaacaaggcggcagtggccgcggcaatattggtagaggtcttagacatgcattgactatggcacaaaacaggcctcagcttgtccactgcggcctggatggcaaatcataccgtcatgaagtgattgaagaacgccacagcggcagagtcctcaatcagcagggaggggtcatcatcaggtgtaaaagtgcggattgccccggtgccgtcctgccgggcctccacctggagagacaccttgtccgggccagccttgcgtgcccatacctgcgttgcagcccagttttctcccttgccctggatagctccggcaagggctaaatagataggggcctgttcttctggcaactccacaaggggcatttcatcaccataactccaaccgtcaggcttggggcctaaaaatctgatggtgcctttcagggggtcaaatgcggtgccttccgtttgggaacggtcataaataatgtgtattaacatgatagtgtagcgttaaattagttaagtgctctagtgccgatatagactttccctgtatcggacgtgatataaaaagtagtcgcgcctttttcggggagggcggcatattgttcctctgtcaagtccgttcggacttgagcccagcgggcatctccctctgccctgttaagcagtgatttgtcagtaaggccaagacttccggcatttgtcttagtgatagacgtcgaaaggggaatgccatctttaaattcaatacaaatgttcctaacgccgttagctttgctaatgaccattttgccagaatttgcatacacacgagcctcactgcccatggacgacaatattagaagcccatcgtttagaacaagcctcttgcaaaaaatatcgccctccacatttagcgattgctccatcgtcacccctccggaaaaagtagccccgccaaaattccatgtcccacttgtcgtcgccctggttggattgtccgggtcaaaaccgatgctattaggaccaaattgaaaagtactagccgcacatgccccatctatatcaatgggagccagccgtggaaggcgaagagcagagccgggaatagggagtaaaatatctacatacttgtccgcagtattatatttgatacggcaaaatcctgacccaccgctatgacctaattccaccccgctctcgtccggactaatgtacaacccggttattgtcgacgcttgaatgccataatcatcatagcagacaatggacccgccaacccccagaccaccctttagggttgccagcccctccaccgtcaaagactgcgccagagtgacgccccaagaaaaagacgccggaccagcaacgtcaatacgctggacagagatattagccgtgatgacattaccaagagtagttgtttcgcctgttgccgtaaccccccccaggaaggattgagcaccagaccatgtattacttgctcccagtctgccataccgcgcattaagctgttcttcggtcaatccgtctttccccggttccccggcgtcccccttcggcccctgggggccttgcggccccggttccccggtttcccccttcggcccctgggggccttgcggccccggttccccggtttctcccttcggcccttggagtccttgcggtcccggttccccggcgtcccccttcggcccctgggggccttgtggcccggtcaaatcctgttcaaccatgtaccttgcttgctcataggcccaccacgccagatcaacggagtcaacggacacggtcacggcgtcgctaaggcgcacaatcatacggtgtgtggacgggttgccgccatccctagggtcaatccgttccgccaccgtcaccaatccggataggatgcgttccctgggcgtttccggtgcagcctgcaaccagacttcccaggacaacatccccagaccttgaggggggatatgcaccagaacgaccccatcagcggcaatggtcatatccaggctggttacggtttcccctgtcttgagcgtggcggcgaggtcggcggcggacaggtccaggggaacgcctgctgcgtcctggataaggagggagacgtcataggcagtccccctggcaagggacagattggcaacggcggcaatcatggcggcaattagactgtctcttccgaattctccgcctgggctggttcctgggctggttcgacagggtccttaacgaagggcagatgcagcagttccaccgtgtatttctgcgcgcctgtgcgctccctggaatcgtccagattttccacgtaatagtttttactttcaaattctaccttgtccccaatctggggcacaggcagggaggatgctttttgaccctgtttgcctccgcggatgacatccagcgtcacggtctcttgcgggtcccagtagaccacggattccgtgtttccggattccccaacgaatttttcactggaacgggacggcttgcgtttgacggatgtgacaacgccccaggggacggtcacgccgtcaagcccgaagcagatgtcattaccgcgcacgatgtaggaattttgttcagccatatattatatagtgtatgaggttagaattcggtttcaaaagacgtgacttccacggtcatggtccagaccgcccggcccggcgcgtcttcccagacgatggacaggggggccgcggttcggggcttgcagatgaccaggccatcctgacccaaggaattccacatgagcttctgcagcacgcggtcagtcatgtggttggcggtgtccatgtctccgccgggaacgccagtagcggcggcggagatgaacaaggtcacttcgcgggaaatgtccgccttgatgggcatccctccctcaatatcgtgggaaacgttgagggcaccgggaagaacgaaaatgacgctggccggatattggttgaggtccgccagggcggcctcgtaggtcaggacattgggagccgtgacgcattgggcgattccggcttgttcgagttccgcagttacggcgcggagcaaccattgtgtgtctgtaatcatatgattttacggttggagccataagcaatggctccggattttttgccgcaggaagaggggaaagggaacgtgccgtccctaacctcctgcaaggctttaagtgctgcatcataggcggtccgctggtcgtccgtcgtcttgtgcagcagcttgaccagatcgaacacggcgatatcccttgcccatctggtcatgagattggccggaacctcgcggccctggcaatatccatccaccagggccgccgcactgagcatgttgtctgccacggggtcttcccctgccggggcctgcttgcggatgtcggcgagctggctggccgtcagggaggccaggaggttggattctgtcaggagtgttttcatgggaggatataggcccggcgcgctggcaaatcggcagacacgccgggcaattcatgcggggttaattttcttatgctccagccgggatagcaggcatcagaatcaaagcatcattgagtccgacagcagacccgaagaaacattcaaaggtcaagaagtgcttgcccttgccctcggcgtaatggcggcgataggacagggtaattccggtgtcggggtccgtgatcgttctggtttcgaggtaggctttgggttcgctgggagtcacggcacgggtggcaaccgccatggcggcaggatgcaccacaaatccgttaggggcagcagccgaaggcggcagaatagtagattcgaaaaggtcaaaacccaacaggcggggaatgaccccgtcgcgaatgtattccgtgccgccgtaagccagcgcagatgcaacctgaacggaagaatccttagacagggccgtataagcggagggagaggggaaataagtgcggttggtcttcggcactttcagggtccccatcttttcccgcgccagcacgagcaggtcggcaaccgacattcccgccgtcggcgttaatgtcgtgggataattggctttggtcattttcgcgaacgtatccgtgatgaccttggctgccacagcattccccatttgtccggcccatattttcaggtcggcagcagagctttccaggaattgtcggtccgtcaagccaactgtggctttggcatagccatccagcgagaccgataccgccccaagtgtccccgtgtcggtttcatagtcgttttctttgtcggacgcttcaatagacccaatcaagggcaccttcaacgtgtcaccgcgattggccgcgtccttggagtaattccgggaaaacatgttgagagccgcaagggattctttgaacgcttccaggccgtcagtaacgatgatgtcatcgttcagtttaatatcaatagtagtagacatagctattatatatagtgtgtgagtgaattttcagggctgttagtgcttcgaagaaagcaattctttccggtgcttcgcgaaaaacgctgttcgtgcagcagggtctttaatggcatcataagaggccagcagggcttgcccctggggattgccgtccttgttgtcctccggcttgtaagccgcctggaacacaggattgacaggcagggaggccagcagtttttttgcatccggatttttcaggagggtttccttccaggatgctttcatatcaggcgagattttcccctccgcgcaggcggcttccacggaatcttccgcggccttggcctgcatgtcggaaacaatcttctgcgtttcttccagttgctttttcagggtggcgttttcgtcctgtaaagctttgatttcttcgtcggtcatggttgtcgtttctgtttttgtgttttcaggaccaccgcccgcaggggcggaggcagaaagggattgaatggctctgaatgcggcccggttgaccaaaccgcccatgttggcggaagtacctgtcacggtgcaaatgccgtcgccgtccggctcggagaggtcgaaagaaggagaaaaacgcttgagggacttgcccttcttggcccgcccctcatcggtccaggagactaccaggcggatgcctcccgtcttggggtcatcccctccccagtacacgcggttaacccaggcggatgcctcgccatcggcatgcaggaaatcaatataaggtgcatctcccgtcccggcgtcaaattcagcctggtacctggcgcggcattcttccacgcgtgctgccgcggcctcgtcaaccaggatggtcacggttacgaccttgccctccggagtgtgtggggaaaccgtctggacgccggggggcatccactgaatgtcgtccgtatcgtcatccgtcaggccggacgcggagaagttggcgtaaaacatcatgccctgactatgccacagacggagggtcagcttggacaccgaggcctgaatggtaatcaggggcgtccctggcggcgaagaaagatgcgggcggcactgttgactgccttcagtactttgtcgtcgggaggcaaagcccgcgggtctttggggatgcgttgccctcgcttgaatacatagtacattttttgtccgagagccaaccccaccgggcggcctccggaccagacagaccgtaggtctttaatgacgcggggactttttccgtgggcttctgctgtgaccgggatagccaacattttggctttcttgggggtaatgttccccccgtaaatgtggatagccacatggggatggttaatgcggaccatgatgccgctacctcctaccatgggagccgtgcaggaattagcgacagccagccagaaattggtccgcgtgccccccagccggttcggcctggcgttcttggcccggaaatggctgatgagcgtgttcctcatggaaatccccatgattttttttagggcaggctggcgtgaggccagtcgttccagttccggcgtcaccgtgtccctagtcaatttcaggtcaatgctcatacgcgggggacggaggttttgccgataactgccgccgtgcccatggcgtgttccatggcttccgccagggcggcaggatgcaggcttttgagcaacttgccggatgccaggtagtcggccaccatgcgccggaattcgtcgtccgtgagggtgtcgtcacaggcggcgcgggtcagtttttccaaccctggccgggcatcccccagccaggcgtccaggatgtccggcaggtcccggaggatggacttgttcaaggctgccagttggtcgtccctggtcatagagaggcagccgctttgttgagttcccccagatagtattccctggccgcggagggcatgccatccagggcttttgccatcagggccggattgccaatcccggaggcgggaggcgtgataacggcttcccctgccgcgggggctgggaagcccatatagctgtaggcccatgcctgggacacggggaggccgttgctgaccatggacgttaacgccagggctttgggatatactttgtcgtctccctggctttcaaacaattcttcatcatcaccgggcataggagcttcaattgtctcgtagacgtagctcttggacaagggtatccccttgtcgagtattttgccgatacggtccacggcggcattgcggtctttgacttccttactagtgggggcgaaataaggcaaagacgaatcttcatttccagctggtccgttaaaatcgaaaacggcagtcaataactgttcattcatgacttccgcgacccagtccgcggcggcgtcaatgatgtcgctccggacattgtagtggacttctcccaaggcacggctcccggcttcgcccggcgaggaggtcaaggtctgccccaatatcagcaggtcgcaggcggtatccgccatatcaatcatctggttttgcgggttatcgctgcccttgttggacggctccttgagttcaagagtgctgccagtaggtgcggcagcccaagcggcggcacccatgttttcaagcatggactccataatatcctttaactccgggtcactcttgtcataagtagcccagcggatcggttgcccaaaaatttgagcgaaatttagcagccagtccgcgctaaaattggccgcgcaccaataccaagcaagagagcgcaacaatgccccgccggacggatggccgaaagagacgttattgacagccactaagaatttgctcgggaggaaatcccctagggtatcagacccaggggaccgcattccgaacaatccgctttccacgtcccatccataccagcggggatggactttccgcgtttggcgaggaagccacgcttgcggcatgtggacacagccacgaacttcccagtcaatttcccatactgtgaccccgcagaaccagccgtcaagcagtccgttgactgtcccacgccaaccttggccgttctcgcggtagttacctttcatcccgtccctggtacgttcggccagatgtttcatctcttcccgtccttcctcatcctggacattccactgcaggccgcacaccgcatttttcagttcggttacattcttcaccaaccgcggccaggtccggcacatgaggtcatacagggcatgttcttcttcagggcaatctccgttcagggatgcgtcaagtacgcgggcaatgtaatccggagttacccaggctaggtccggcatcatccagcgcggacgcgcagggggtatgaggatgcgttgtaggtcggatgcctgacgggcgtttttagccgctaaaatctgcttgacggtcattgacccggctgcgggtggcaagctcgcgctagagggtccgcggtgcgccgcggaggcaatattctttttgagggtgatggtcatgtttatttacggtttaaagttcttctcttgtggtggtatttaccccggccacggcccatgatgacgccgtccaccgtttcacgtgtccaggtgccttcttgcgctttcattgtcagggaatgataggcgagagccagggcccagaagaggtcggcgtggccgctgtcggtccggtccgcgttgtaacagaccagtcccgtcttggtgtagcctttttcaatagcggcaatatgagctcgcaggaggtcgtggttggggatgatgatttttccggcttccatagcccgcgccagattggatgctagttcttcctttgtagcattattgaaaatgacgccgcgcactttgtgcccgttcttccgttccttggcgtccataacatacttgtcgcctatacttgtctggtcgatgactaccagcttcacgccctccgttccggtcatctcgtcgagttttttgtcccggcttttccaggaatggtctttgtgatagtacaccaagcggacgataaagcggtcgtgccagggcttgagcgcaatgtaacagtgcaggtccgacatgcgcgccacgtccacgccaatcccaaattctccttcttcctccgcaatattccccgcggcggaagcataacgttcattggtacatgcaatgatcgtgtcccaggggataagctgccccgccgtatcctgcggtacgcacatgtattcttccagataatcggcttctgtaagacattttgcccggcaggatttgaggaattcctcatgggtcattgacttgcccgtcttggcgttgatgcgttcgacaatgcctgcattcaccgcgtccacaatggtgactttatggaagctccatcccatcggattgccgttattgacacaatcgttaatgagctggttaaagacggattgtttgccgcggtgagtcgagatgacgatgcgctggccgccccactgcgtcacggcggaggataccttcaacagtttctgctgctgtttatgaaccgcatattcatccagtaccacacaaccacgcttgcctgccaatacatccgggttgctggacagggcaaaaatggtccggcctgtggaaaaagtaatgctgaagaccgtttcgtcttcaatgatttcttctccgagttcaacggccccaagattatagatttccgcccattttttgcagtcatcgacaaacagttttgccgcagtcttgtcccgcgagcatatccaccaatcatataatgcgccttttttgacgcaggcacgcaccgccttgagggcggtgtattccgaaaagccctcctggcggcctttttccaccagaatattgtcgctttcgtcttccaggtaactcgcctggtaagacatgctccgcggcatccgttccgccttcttgataacatggaccttgctcatggcgttaaatcaggttcatggcattttcaatggcggcaatttgttcttccgtgaggccattgccggattgggcctttttctggctggccgcttccgccgcggcggcttcgcggttttcccggcggatgtccgccatttcccggcgaagggacatcatgagtttgataatatccagcatcttgccgggcttgtcggcaatcatggtttggatgtcggacacgtccaggccgtcaagtgcgccttccagcatgtccatggcagccgccagtccggcttccgcagggcctccctcttccgtgtattttttgagcaggtccactttccaggcatagcggtcacgggcggcaaccaaacgttcctggcgggctaaccagtccttgtgtgcgcccttgcggtaattggtgacgttctgggcattaacattggggtatccctccgcggcacacaaggatgccacatcacgccaggttccaccgtcggccagacatcggctgacggcatcctggaccctggcaggcatgcggctgattgccgccgcggctgtccggacggtggtcatgacagcagggcctcctttcccgcggtgagaattttccagcggacgccaaacggagagggaggcaggcggaggacatatcccagggcagacagggtttccagttccgcctctacctggcggtggtcaaatccggcaagcctcacttctgtaaccagtttttccgtggacatggagaggccaccgctgatgttcagcagttcaaggataagctgtcttactttctgcgcttcggtcatgatggtgggattttaaaacaattcaggccgcggcttgcacaccgcggcctgaatggcagttacttctccgtaaggcggcccccttccaggcggcctattgaccgttggaggccctgtaaatattcgttggtgtcgtttcgtatcttgatgatttccgtgatgatgtcttttttgtcctgggcctgcgtttgttccagcctgtcaatgcggccatcaatgccattgatacgcttgtgcagcactttcacattgtccattgtggcggcttgacggcttttcaagatggatacaggctgcttttcaatctcgacggattgtggtttcccctgggactttagccgcacccacgcttgcaaggcgttaccgacaacagacgcgacggtgacggcctgccacaggaattcactgttttccatgttggggctagtagttggcaatgcctacggcaatggctccgcacagattagaggcgttttcaagggccgtttcatagtcggcatcgttgtcgatgaaaaacggctctacaatgacgcagggagccacggttccgcgtagctgtgcgccgccgcgctctgtcccggtaatgggcttgatgccccggtccggcaatcccagggccttgaccatctgcgtctggatgcactgggccagacgcttcccgcggggggacgcatgccagtacagggtttccgtgccgctggccgtcttgttgaaagcattggcatgcagggccacaatcacgtcggcgttggcctcattacaagcccgcacgcaggcagtcatgcccgtgcctcccccttccgtttcccggttgacgataacggccccgtggccgtaaccgttgagatagttaaccaacaactgggcatacgacttccaaaaacggtactcgctcattccgtaatggctattttccgcgccaggcgcggacgggcaatgtccgatgtcgatacatactttcatgatagtttttcctttctatacaggttccgggcgggatgaccccgcccggaaaggttggggttacttgacttgctggacaacgggagggacggacgtttccggggcggcctgcgtccaaaccagggcatgcgtcttatcgtcccaggtcagtgtccggccatcacgggtgagggtgtattgaccgttctggatgctgattccggtatggcccggagggtcggcctgcgtcttggaagcgcaagacgactgggtcaaggacatccaggcgacgacggctccaatgatggccccggcaaggaccttggcccagttggaggggattctacacgccatcaggatgcgcgtgatgattccggcagcttcttccttgttaatgttattcatggttcttcatttgttaattaccctatttataggagggcgccattttggcacaaaaaaggccgcaccttgtacggcgcggcctgcatggtaaaatgttgtggagtttttagttgttaagctctttttcagttaattccttgacaaacttgtaaaccttgtatgacctttctctataggtataaacaccaatgatgcgtgcttctatgtccacagaatcaccttccgctaatggttttcccttgtatttgtgcagcagcacaaccctgccataatcaggctcccaagtgacaatggtacggccagcaaaggcagtccagcttgcgctccccatgtacatgagcatgccttgaggcactttttgattaaagtacattcgtatctttacaggtttttccttagctaattcttctttaggcaacggctcaaaggtgtattctttttcctctgcctgccccgtccaggaaaatgccaaagctaaaaacaaaataacgtaacgcatgccaaccatataggataatcgcccaacacctacaagcctaaatcttcttaatccatcccaccatagcgtctttcagcaggcataatttttcctccgcctgcaatgccctatccctccatattttaacttctgacgccattccttcttcttgagtttgcagcaagatggagaggattttgtcccgcatgcaggatgatacatccccgccattttccaagcggacgatatgcaaaacgctatatccggacaactctgcaaggttcgacaaagtcaatcttgtcttttctctcaacgtcttaaagtcaatctgtttacacataggactaacaccttacaaaggatgacttgtcccggcaatgtatcaattcttcaatgtgtctcacgtgagacacgttttttcggcgttaacgattaacaataagtacttatactttaaaggcaactgttcacccgtgaacaagtgagctaaatttttttaagccatccctgcatggctgatttgagttgattgagcttttcctctgcgcgtaacgctctatctcgccaatgctgaatttctgttttgtcaccttcttctgttttttgtaacaggatagacaggattctatctctcagtcgtttacttcctatgtcatttaattctaatccatttatggatgcaatgctatagccagacaactctgaaagctgggagagagtcattccagattgttcacggaggctcttgaaatttacgagatttgtatttttctcttgcatgtttacgaaatatgtaatacgaaaagtgtatgttaacgcgtgtacacattaaaagcaatcgccaactctccccggaggttttggccgcgcgggaaattttgaagaggaaagggtggtcttataggactgcggcccctttccttggtgttacctaccagcaaataagctttgtcctcaatggacataggcaaagcatatcccttcttcgtcgcattcatgccctcccatatcggagagggaaataacaacttcaaccccaaatacgaaaatgaacgaacatcaacgcaaatatgcccgccgtgaccgggaggacaaacagaaagccctatatggctgccctctggttttcgcgccagaagaagaaaaacacgctatccgctggggagccgtcatcctggtcgcctgcctgggtgtgttcctctggattgtcgccttggccgtcatcgactgtattatttaccgctaataatcatgaccgcgccacttactgacaaggactgggatgccgtaagcccggagttaaaggtcctgtgcctgctgcgtctgctgcgccgtcccgctgtaaggaaatgggcggcgcgtgaatccggtttccctccatccggttccctcacccagcggcaactggccgcctggtgcggcgtggatgaatccactatcagccgatgggaacgggacgccatcattaaaatgcgtggagccgccagacgatgtggcctcacacaagaaatttcacaatacaaacactaaaaaatatgagcaaaaaagacattactcaaaacatgctgaattgcctggcggaatatgccaataacgtgcgacgtgatttaacatccgcttgcgccaatgcgctgaaagctggggcctacctcaaccatatccgcacgacgaacaatatccccatgacggacgccctgtcccggattggattgagccgtgccaccgcctatcgctggatggacgcgcacaataccgcttgcaaaatcctcgaactacaggctaccccctccgttctggatgcggatttcgcgggccatttggccgctctggacgacattgccaagggcatgagcctgtcccgtctggcactgggggctccggctcctagctccgacattgctcgcttggacatcctccaaacaggggcggaaaccgcagaaacggaacaggaggaagaactctataagcaagccgtggaaaacgtagagtccgggaaatggactcttattcaggccatgcgggcagtcgggggaaaggctgcccaagacatagccatcgaacgccgtaaagaccccgtgtatatcgaaatcgacgaggaaagcaagaagcccgtcggaatcctcccgaaagccatcaccagtcttaaaacgggcctccaaaactggaacgtctttgacggtgaagcaaaacgcgtctttgcccaactgttgaaggaagttcttagtgacctgccggaagagcttaaaaagtacctctaactttacgcgactatgaatcacgacgatttgatagccaaacttcaaaagctgctcgccctcgcccagcgtggcgagggcggggaagccgtcaatgcccgcgaattgctggacaagatgatggccaaatacggcatcgacgaggccagcctgaccgacatccgcaccttgagatgtgccacagactccgacgcagaaaaggaacttctgattgttgtcatcagttttgccctgcaaattccaacggtccaggtggaagcagacatcatcgtccgcacagatgattttgggatggacctgaaaatgacggtggaacaacatggattgactgccgctttattccaacatcaccgtgttgggctgggaaggtccattgaaaaactggcctcagaccaatccaggcaggcagccttaatccatgaggaaataggccgtctgacctccaaaataagagacctgaaagccatctccggcaacctcaaaaagacccaggagaaggcccttcaaatggccgtgtgcgcgtatgtcaacctcaacaacctggttgattatgctgggtggaaaaacgccacctccgacggttctgacgccatccagtccgccatggcttcatgcgtccaaatggacaccaaccccaaccaacttccggcacaacgcctgggcaacgataaccaatccgatgattgatttacccatcatagaacggcaaatccgtcttagggcggcctatcgttccctacgccatagtatctacagtgaccgtgaattgtcccgtatggaatgggagcgtgattgctgccgctatcccctgcgcggctatttcaggcaaagaatgtacgagaacattaaagcagcctggttcctacgtagcatcagcagggggacgtaccgcatcatcatgcggagtcaaaacgcatcttgggatgatgccaccatcaacctcggcaagggcaaatgccatttttctaaataattcctgattcaatttatcatggcaatacttccagaccattctttcaacgccttttccgcaggccgttccgggcgacctcggaaagtggaactgacggaggaacagaaaaaagaactggcagccctctacctggcgaccaacgccaccaggaaaagcggcagcatgacgctggcgtggtccatttttgccagccaacacccggaacttggatgggatgccgcagccaaatccagcaagcacatcattccagcagtggcgcgggatgttatgaaacatgcccggcccatggttggataccatcgtggaggagaacgcaaattaagggaattagcctattccccaggactcctccgccgcaacctggacggaggactgctgcgagccggacaacgcgcgtcctgggacgacgccaccattaactttggcgtgtgcgtcccatggccttggaggggaagcggcgacaagtgtgctgaaaaatatggcgtgcgcctgggacgcttccaacttttggtctgccatgacgacgccaccagcttcattcccgcctactcttatattatcagatacgagcaaacctaccgcggggaggacgtggccggagccatgatacgcacctgccgggacgtaggcatttttgattccttcgtattggaaggaggcgtctggaaaagcgaccgtgtccagcggttgctggacggcttaggcatccgccacattgacgcgaaaggaagaccccaatgtaaattagtagaaaacttcttcaatcgtctctggtccgtcctctcggtggtgcccggccaggttggccgctaccaggcggaaaacaaatcaaccagcgaaaaatacgtcgcctgccgcaacggacgccaggacccgcgcaccctttttcccatgctcacggacgccctggccgccattgactgggccattaactacctcaatacacatccggtggaatcccgcgagtacggcaagtggattccccgcgaccgttgggaggcggaccttgcggcgcatcccatgcgccaagtggatgccgatttctcctggttgcaggctccggccatcgtgaagcgcaaagtggtcaggggaatgctccgggctaccgtccccggccctctgggggtgccgcaacgctggaccttcagcgcgccgtggctctggaccgaagaaggaaaggaactcatgctccactttgaccccttgggcgaatggccgctttccgccgtcgtgacggctccgggaagcgtcaaagtcctgggagaagtctcctgcaccaatccggtcagcatgggtggatgtggcgaagacatttcccttcaaatccgccagattgttcgcacggaatatcgccttttgactgctacaggaaaaacgggccgggaatccaccctccgcgccctcaacggtcaaacctctattgcccagggcgtcaaaggacaggacggcgacgtcaccgcggacactccgccggacgctgtccaggttcccgctaaggtgcgcgcttccaagctggcagaccctctttcccgcgccgcggcagaggacagccgctccactgttccccaaccaatcacccccgccacgcgggacgacttcgccgccatgcgccgccgcgcccggcaggcaaacacagcaaccaccctcaacttctaaaaaatcatgaacaaatacgaattatcaacacatccggacgttggcagcctggcggacaggcaagccagcctccacctcaatgaccaggacttctgccgccgtgtagggttctcactggccgcatcctcctggggtaaaatcaaggccggcacctggtccggcaattgcgacaatgccctggtggccgtccagcaggcccttgcctccggtgacgaccagccagccgcgcccgtcgtggatggggacaccgttcttcttcctcatatctccctggccgtggacgccgtagaagcggcctcctgcaccaaagacgagcatcggttggttttcatcgtcggaaaaacaggttccggcaaatccaagacggcggcctatctggcctccagattcaacggagctatcatcaacgcggccccggcttgggaaaaaagttacctgcacgccctggcctccatcggcgcggggctgggcatcggcaactcctggcggtctgcgggcgacgcggaacgctccatcattcaagccctccagacagccccgcgcctcatcatcattgacgaggccaaccacttcaacagggcaactctcaacttcctgaaaaccgtcctcaacctgacgcggtgcggcttggtcctgctgaccctcccggaccatatggcccgcatgtctgcggacagccgcgaagaattcccccagctcctgcgacgcagcatcgccatcatccatatccccagcatcactggggaggaagtatctgccattcagcgcggactattcccgcaaatggatatccgcaacacctcccccatttgcgcccttgccaaccagttctacaacctggacaccgtccgtcgcgtgctggaagaaatcgacgccggacaaacgccggacgccgccgtcaaggcggtgcgccgccaaattcaggccatcactccaacccaatccctcaactagcatgaccgctcccgccaccattgaaacggaaaccgccgcgcaattcatcagcatggctctctccacttatggagtgccgttccaggtactttctccgactccttaccccgacaaaatcggcatccgtctgcacccagaagagcaatactgtatcgtccacgcggaagctttcctggcctggatgtccaccacacggccatcccttgacaaactccgcgccactctcgacaaaaaaatcaaactaaaccgtcgtcatgtctaactggaccgtaaccgtccgcaggaagaacgagatgaagcccacccaccatctctggcttaacaggaacatatggtggctggtcatctccctatataataaggaaacacgcaaaacgatgcggcaccgtcaaagtctccggacggaggaccaggccgtcgccatcaaacggcgggacaaagttctgcaggctctctatgccgcctacggaaaggaagaaaaataatatggtcagagagccggaagccatgcccttttgggaagccctatccctcttggaagggaaagaagccgtcgcctccgccatgaccacggcggaatggcggcgcatgcccgtggctgtccggctcaaatctcaattttccgccacgctcacttccgtaaaagccgccaaggccatcacggattacctgacgggctatgtccgcggagacaaggccgtcaatgacctcggccaagaataccaagtgtatcaaggccgggcggaattcgtggcccaaatgagggacatcatgatcgaggagggcttcggcaaagttcttcatgacgggacgttggacccggaaattcatgacaacgacctccgggacctgcgcggctgccgccgccttcaactcatctttgacacccagacggagcaggccgcctcctacgcccaatggcaggagggacaggacccggacattctggacatcttcccctgtcaaaaattcgtccgcgtccgtccggttcacacgccgcgcccttaccatgatgccgctattggcaccatccgccgcaaggatgacctggccttctgggtttccctcaatcgggattttcaagttccatgggggccttggggcttcaactccggctgcggtgtggaggacgtggaccgcgacgaggcagaggcggaaggcgtcatcaagccgacagacaaggtccagccaatcgccaaagactttttggaaggtctgaacgaatccatccgtggcctggatgaccaggcgcgccgctatattcaagcccagcttgataatcaggtccgcttcctgggtgattccgcgtttttcaaccccaaggaccagccgctgcccgttgacccggcacagatcccgcccgtgcgtccggccaaaactccggagcaaatcgacgcccagaaaaagcgcattggagaaaccattgccgctcgccagcagcggcaggcagaccagcgcgccgccgtggaaaaaacagccaaggaagacttccgcgcccgcagggacgccgcccttggacctctccgggaacacagggacagcttgctccagcaagtggcgcaagacaaatctattgagtcctggatggcttatagagccgcggatgaagcttacatcaaagcggcgaaatcctggaatcccggaggcatgcttcacaaagccatgattaaggacattgcccagcgtcaagcaaaactatgggacaagacctatcgcgactccctccgcttcctaggcacggaaggcatgcttgtgcctaaagacaagcgaggcatgattgccccgtcctccgtcatcattgactcacatctacgcatcaaggcagacaagccgcgcaaactctcccccaacatccgcaaggggctggacctcgttacatccattgtcccggcagacaagctcccttccgggctgggcctgcaaatcgtcaaaaacaacagtctccgcgctttccaactggacggaaatattaaaatatccgaccagcacgccccgtctgtcgtcgctcacgagctggcccatgccatcgaattttccaaccctgacgttctccgtaaatccgcagctttcctgtacgaccgcggggaggggatgcctgcaaaatccttatccaaacttgaaccgggagttaaatacaaatccgtggaaaaagccctggaagacaaatggaaggaacggggaggacgggcttatattggcaaagtttacgtaaggggctatcattcggaaatgaaaagggaggactttgtggcaaacgtccaaggctctgaaatcctgtccatgggaattcaacgcctactggaagaccccgtcagattccgccagcaggacccggactattttaacttcattaaatcccaattaagccgcatatgatgtatcttacgaaatcccagatggataaaatggatgctctttttgacgcccaggaactcccggacacgtttcccgaagacatggaatatgccttcatggacttgctcgctccggaaatgaccctggaacgttatcttgccatgccggagcaggagcggaagaaatggtggattaactgtgacacccagcccgcagcacctacgggattcacggacccggaaaacggagaagaaatctacgccacccactactactttgagcctgccagtccggaaatcctcgaccgaatttattaatatgaaaaaagcaaaacaactcgaacttcctattgcctatcctgaaagcggacgctggttcgttccggtccggcaatataaaatagacgaaaggacctatgccctccgcatgggcaagcctgtccagttgggcacctcctacgaaatatcccgtgagttccgcgttggccgccgtgttctggcacgtctggctgatgctggattcatcgaacgtcttcgtcccactccattcatgagcatgtactactatgccgacgtggcttcttttttggaacgcacgcgccaagaccccaatttctggacggaagcgcgtcgggaggcttatctgaacggagaaaatccagaagaggcttccattattcattagaggcacggagattatccagggcgagccgtacaaggccgccctgtttttttttatatactccgccgcatgttcaccaactcccctattatctgcggtgattctcttccggtcatgcgcggtcttccggaccaatcctatgatgctatcatcactgaccccccttatgcttccggaggattgacgaccgcggagcgcaagacttccccggcacgcaaatacatttcatccgccaaatatctttctttcgagtcggatacacgggaccagcgttcccatttcctctggtctgtcatgtggatgcaggaggctttcaggctcacccgccacagcggctggttcatgtgctttacagactggcggcaattgccgacaaccagtgatgccttgcaggtggcaggctggacttggcgtgccctcgtcacgtgggacaagacggaggcttgccgcccgcatcagggtatgttccgcaaccaatcggagttcatcttgattgctacacgcgggagcattggcaaagagcaggaccgcccgcgcgtctttccggctggcgtctggcgggaatacctccgcccaggggacaagatgcacctcacaggcaagcccgtcaatcttatgacccatctcatgagcgttcttcctgcggattcctgccttctggacccctttgccgggtctggcactactcttctcgctgcccggcaactgggccacacggcccacggcattgagctttcccctgactatgcccgtatcgccagagacaggctggcagcacccgccaactagccgcggagactccgcggacgcctcgccactccgcgcggagagcgacccagagagcgtggagagggtgtcccacatgggacaaatgaccctttcagaatttcaggtttcaccctttcagggaattatgtgtgtaaatgctcccgtgaccctttcgtctcccctcaacaacctagtaatttcaaggcttttcaaccttcttcaaccaatttccacccttttcaactatttatgcttggtcacactgacgggcttcggctccggagcgggaggggccggggtatcatccgtgcggacagtcagcgcattcagattcagggttccggttccggcggagctgccttccttcaccacgtcaaaaacgagcgtccctgcctcatccgctgccgcggtccattccaccgccatgtaggtatccgcgtccgccgtgttgacgccccctttccacgtgtcttccgtgcgggaaccggtggaggtctgaagcgccttcacgtccacatgctctccggacaccagggaaacggactggtacgccggctttccgttgcccaggaaaaaagaaacggcatattccttgcccggcgccagtccggagagggagacgcgcaccgtcccggcccggaccgccatgccgttggtaaacaattgcagactcgtattcagggcttccccatgattcggaaaggagaaggcgctttccgcctgcagcacgccgcccggctgccctccgcgggtttcccccttttcccgccacgttgaattggcgttgttatagcacatgtttcccacgctcgcttccgatttggccgttaccgccagataaacggagcggccaaacagcgttccagccagcacgggggaggaagaggcttccaggttattcctccgcaggggcacgcttttcagcgtggaggatggcgtggtggtcaccacccccatattcgtccagcccggctgtgccgcagaagccgcattgccgaagtccacgccaaaggattccaccgttcccgcaccctgccccggattccccagagcggagagagccaccgccacaaggacgccgaagagagatttctttttcatagatataaggttattaaataatctaacagatagacttctgcaaataaaaaatgccggaaaggagggatgaacaacatgggcggtccatcccttctttccggacatctcgtcaaagataatgctgaatgctccttagtttttgcgccgccgcaacagcagcgccgccagtccgagcaaccccagggatgccgtggccggttcgggaatgggttcggttgccagcatgaatccgttcaagctgacatctgcatttaccacatccgcggccgctccggcggagcgttcataagtgagcgtcacctggcccgaattgtttgtggtgaatgcccattccatccccacgccggaagaatccgtcgtcccctggaaggttgaaccggtcaccgttcccgctccttcatagccgtccatcaggctgcctgtgacattgctgacaccgcccgagagggccatgctggttttattggttgagaaaccgttgttgcccagaacgtacagataataggtggtattggccgccaggccgctcaacgtgaattgcaggccgacggtctgccccttcaccccgttgcacttgccggaaatggaagattgcgccatgctgtccgggaagagggagttgatggagggggacgtgcctgtcgcgtccaggtaacccgcattcatggcggcggtgcttttgtacgccatggtgagcgtgacgtcctgaccgcccagattgccgagaaccacggacggggaaacatttcccccgtttttgctcaaggaagcaatggaggcgtaggaggcggcttttcctcccgtgatggaggaagcctgggtagccacactgatccaatccggatcccccgcagaggaagaacccagattaattttcagggaagccgcagaagccgcggagacggcacctgccaataatagcagaatgaatgatttcttcatggttttagccaattcacaagatatatgccggatttggaatccggtatggatgttacagccgtgaaaaattgttcttcctgatgctctgcaacatttccccatcccccttttcacagccttataccgccggccctgacggctaccgccgccaacatgcagagacggtcagtaatgatcgccggaacaaaaagaaagcctgttatatcaggaaatccctacggcaatttccaggatattgccaagccaaatttccttaaaacgtttttctttcaattttgtaggcttgactccggattccaaatccgtccgttttataaccctgtcctgaccaataagttattttttatcatttaaaaccggaatatttatgatttccagacttgaccaaatattctttttctgcatttccacgaattccattaattattccgtttttcatggaggaagatggttgcagccatctacggttccacatccggaaccagcaataaaaaacggacggtttcccgtccgttttctggaaattgaagtgttgaactaccggatcagtagtccagttcacctctcatgacccggcgctcgaattcggccacgtccaccacctggccggtcagccgggcgtgttccgtggcaaaggccatgacatgggagtgggcggattcttcaatggaggtggtcatgtccgccggagagggaaccgtcagcatgtcatcgtaaagggcttccaccagcccccagtcaccgccgccgtggccctggtagccgccagccagttcctccagctccaccacgcgggtttttccgccaaagtggggcgtgacggtgatttcaccggggccgttttccttgtagaaggctccggcgcggattttgcctttggtgccgtatacttcaatatggcggccctgttcaaaggccgtcatcgtgaaggtgccggtcaggccgccttcaaagcgcatgatggaaacctggtggtccggctggtcgttgtcgcactggaggtagtccctgccccacggggaggtttcaagccattcgcagatttcctctgcggtggcttcctgcgcgcggtcgtaaaccatgcccagccagcgcttgcattcgtcgtccgtggcgtatttgcgggcgtcccaggggtcttcccccaccggggtggtccagtccgtgcagcgttccggccggggggaggagagcgtttttttcgtgaagaaggtgagctccccgaagctggctacggagaggcacttgcgccgccccatgagccagtagaggatgtccatgtcatggcagcatttggccacgatcatgggggtggaggttttgctgttgccccagtggccgcgcacgaaggagtgggcgaagtgccacgcccccacgccttcattggcgttgaaggtgatgacgtcccctatttccccgctggcgatgatttttttcagggtgcggtagaactgggtgtagcgcagcacgtggcacacggccacgcggcgtttcagctggcgcgccaggtcgcgcagttccagcgcttccttcagcgtcttggcgatgggtttttccagcaggacgtggtagcccagctccatggcctttttgcacggggcgtagtggtagtcgtcctgcgtgccgatgatggctacgtccgccaggcgcggttcctccagcagggaggcggcgtccttgaacaggcggatggagtcccgctcctcctccggggcaaagtcacgcacggcttccgtgcgctgcttcacggggtccgccgcggcggcgatgcggtagcggtctttttgttccatggccagcttcatgtaggtgcgcgtgcgggagccgcacccgatgccggcgagagagagtcttttttgttcaggcatgagggttatattgagagattgatttaaaggacgccggatttgacaagcagagcttccgcgtccggatcacggcccatgaagtcgcggtagagttccgcggcaggcttgctgttgcccttgctgaggatgcagcggcggaagtcgcgcccggtctgcgggttgagcaccccttccttcaggaagcggctgaaggcgtccgcttccagcacttccgcccatttgtaggagtagtagccggaggcataacccgtggggtccgcgaagatgtgggtcaggcggcgcgccacggagggaccgcggtgggtcatgggcacccggtagtccgccaggatgcgttcatccgtttcctccagcggagcgcccttgtactgcggccagttcacgtgaagctccaggtccagcttgccgaagcagagctggcgcatgaagtccgtgccgctcatgtagttgcgggcggcgcgcattttggagaacagttcgtccgggattgttgcacccgtttcatagtgcgcggcgaagaggtccacggattcccgctcccagcaccagttttcattgatctgggagggcagttccacaaagtcccaggccacgttggtgccagccagggatttcacctccacatcagagaggagctggtgcagcaggtggccgaattcatggaagatggtttccacctcccggtgggacagcagcgcgggcttgtccccaacgggcttggtcatgttgccgaccatgaggcccagatggggcacgcggggcttgccgccgcgcgggggttcccccacgctgaggtagttcatccacgctccggcgcgcttggagtcccgcggatgccagtccgcataaaaggaaccgagatgttccccgctttccgcatcatgcagttcatagaacaggacgtccgggtgccatacttccaccgcgccttccggcacttccccggattcaccgggcttgaacgccaccgtggggcgcggcgttaccgtgatgccgtacaggccggagtagatggagaagaggccgtccatcaccttttccacagagtagtacgggcgcaaatcttcctcgtcaaaggagtagagctcgcggcggcgtttttcagaccagtaggcggtttcccacggggagagcttttccacgggttttccggttttttcctccttgtaccgccgtacggcttccatgtctttcaggaaggagggcttcaccttgtcatggaggtcattaataaaattcaaggcgttggctccgctcccggccatgcggcgggaggtggcgtagtccgcaaagcagccataccccagcagatgggcctttttatcccgcagttccaggatttccgcaatgagggcctcgttgtcatattccccgtccttccctatggagcaggagccttcccacattttacggcgcagtccgtccgagtccgcaaattgcatgacgggctggagggaggtaaatttctgcgtgaaacgccagcggggggcttcttccgtgccgtggccgttggccagggcgtccagccgggcggcttccttcgcggagtccggcaggccggagagttccgcttcattttccacgatgagttcccaggcgttggtggagtccagcacgttttccgcgaatttcttggtcttcagggagagccgggcttctatttccgcatattccggctttacctcgtccggcaggtccgccccgctttcacggaagtccgccagcgtttcctgaatgaagcgctgcctgacgggggagaggtttttcacccagtcacaggccgcggctgctttcaggaccgtccacaggcacgggttcagcggaacggaggaggagaaggcgaccacttccggcagcatttccccgatggcttcccgctgggcaggttcgtcattgacggagtccagatgcatgatgcggccccagccgaggtgcagttcctcagaggctttttccagagcgccgaaggtgctttcataggtcagggagtccagcggctggtcgcagatggcctggatgttcgccctggcgcgggcgatggcttccataacgtccggcttgatggcgtccggcgtgagccgtgaccaggaaacgaggaaggaggggtccagatagggatggttcatgttgcttgatgtatttgttattgaaaatgaagatggccttattccgggaatacaggagttcatgggagctccggccttccctgcggcggccatgaaaagatgaagtttaccatgttttaggagaatccggaggagcggcgtttgcctgttaaatatttttaatgaatgctgcggggttcccgcctaccagggtatgcggaccgacatccttcgttacgacggagccggcgcctacgatagccccttcacccaccgtgacgccgggacagagaaccgccctggaacagatccacgcccctttttttatcactacaggcttatttttcaagatgaacaagttgccggcatcatgattggacgtcagtatggagacctgcggcccgatcagcacgtcatcttctatcgtgacgcttcccgcggccatcacgtccaggccttcattgatgaatacgcgctcgcccaccgagacgcagtgtccgcggtcaatctggaaggggggagagatgttggaggattcggggaacctgccctcaaagagttcattcacgagcgcccgcacttccccgtcaaacggtgggagcgaattgattttctggcaaagcgtgcggcttctcaccgtttccggccacagtatttccttgaattccctggtgttgatcggttctccgtttttcagtctttcgtaaatatccatgttgttcgcctttccaaagtttttattcatcccagtccctttcccgtctagtctccagtccgttccatgagaaacggcaggatggcaggatggattattttccggcggcgcgggcttgtttcagcgtgtccagcactccggcatggttcgggaagcgtttgagcgcctgttcgcacatgtccgcgcattcccggtatttcccggccttcagataggcgcgggccagcttccattccacggggtacggcaccacggggggcagcagcagggaggagaagcgctggctcccgatggcctcggacatccagacgctggcggagtccgggaacatgagggagcggatttcagaggaatacaggcttcccatctggaggcagcgagcccagtaggagacgctcatctgccgccgggcggcgtccgcgccgtccatgagcaggcgcagaacgccggacagtttgtcaaaggcggacgccacggcgcccggcctgccctgcctggcagaataacaggcgcccatgtattgggtgaccactgccgccatgccgttgctcaagtccggaaatcccttgggcagcggtcccggagaagccttgagcacaagagcctgcgcgggcaggtcaggccgggccagcatcaggcgcgcgggcagtgtcctggcctcccatatttgcaggagggtgccgggggccagcggatgctttttgtccaggggaacggaagcggcgcgggcggcgacggcgttcgcctgcctgtaatgtccggcgcagaattcggaaacggcccggtaaaggatggagcggaaccaggcgtcatccagcgcggggggaacgttttccgccttttcccaggccaggcacaggttttcagagtccttgaaggcggcgcatgccccttcatagtcccccgtgcggaacaggcaatggcccagcagatgatgggcggacgcggagaaggggttggcggccacggccttgcgggcggtttccaccgtttccggggaaatgacgggagccacttcctccagcagggcgcgcatgaacagggcggcctgggagccagggcgttctttcaggacggcgtccaccacgcggacggcctctttctgcccctctccggggttgccctgcccgtcaaagccgtcccgcaggagcatggcgtaaaagaggggtgcgtaagggtcgcgcttccaggtggagcagatggttttccacgcttcctgcgccttcacgggcccgttcatcagcagcacggccagggcgtccgcataggcgcgttcctgttccggacagtccggacgcagcgccagctccttcatgcgcttcatggaatggacgcgctggtcctgaaaagcgggtccggcgcccatcaggctcatgcacctgccccagtgggccatgaggcagtccgggtccagccggagcgcggcgtcaaatttccggaaagcacgcatgtccccgaaggtgagcagatgcgtcattccttccagcaccagcatttgcgcggcaggagaggaggagcccaccatcatcggctccacgccgggcggcagcacggcaggctgtgccggaacgccggcgcggaagacggcctcccgccagccgttcagggacgggctgctcatccagtacccgtgttccccgcctccagcagcggaacagaatcccgccatggcggcggccagcaggacatggcggaaagaggtgttcataaggaagaaacggttacattctgtccggaagctggatgcccagcaggcccagcccgtgcttgagggtgcgggccgtcagctcgcacagggccaggcgggagtgccgcaccgccccttccgatttcaggaccgggcacgcctcatagaaggagtggaaggcgcgggccaggtcaaacaggtaggcggccagcacgttcgggcggcagtcgtccagcacctggggcaccacttccccgtagcgggccaggaggcgggccaggtggatttccgcatcttctgaaagctgaatgggggcggaccagtccagcgggctgccgtccagcttgcggaagatggaacggacgcgcacataggagttctggaggtacggggccgtgtccccctggagggccagcattttgtcccagttgaagacgtaatccgtcattcggttctgggagagctccgcaaattttacggctcctatgcccacgacttccgccacgcgctttttttcctcctccggcatgtccgggcttttttcctccactacgcgggcggcgcgttcaatggcttcatccagcacgtcctggagggaaacggtgtccccggaacgcgtcttgaacggcttgcggtcgtctcccaggatggagccgaacgcgatgtggcggtaatccccatccatgccgcggcggcgctgggcggagaatatctggcggaaatgcagggcctgcggtgcgcccaccacgtaccagatggaatccgccccccacgtcctgatgcggtggtccagcgtcgcgaggtccgtcgtggcgtacaggaagccgccgtccgccttccggatgatgcaggggttggcgcgccattcccccttgtcctgcacgaggaaggggtcttcattgggcggcacggagccgtcggaaaacacgcagatggcgccgtcgctctcccgggccattccggcggcgatcatgccgtccaccagcggagccagggcgtcgttgtaaaagctttcccccagccagtagtcaaagtggatgtcaagctggtcgtagattttggaaaggccggatttggagacttccacgcagcgcttccagatcgccaggttttccccgtccccggcctggagcttcaccagctccgccttgcaggtgtccagcagttccggcttttccttgcacatcaggttcacgtccttgtacacccgcagcagttcgtcaatggggttggcggccagggcctgctcgtccagaatgttcttccagccccacaggatcatgccgaactgggtgccccagtccccgatgtggttgtccgtaatcacgttgtgccccacaaagcgggccacgcgggagagggcgtccccgatgatggtggaacggatgtggcccacatgcatgggcttggcgacgttgggcgcggaaaagtcaatgacgatggttttggggtcctgcaccttctccacccccagacggtcgtccgccagcatggccagcaggcgcgcggcgtaaaattccggcttgatgcggaagttgatgaacccgggtccggcgatttccagggaacagacgccgtcctgccccatccggtccaccacctgctgggccagagcgcggggattcgtgcggcaccgcttggcaagcaccatggcggcgttgctctggtagtccccgaaccgcaaatccgcggagggcgtcaccgaagcgcaaaaatcagcgggaagctcctcccccaacaccgctttcaatgcggcggacaacttttcttcaagaattccgggtatggtcatgtctgcccagatgaacggacattccaacgccgtagtcaaggcgcaactgtcatgaagacatatcttttgacctgcaacccagcccggaaattgcccgggaggaccattgggacgaatgagaccggtgagacaattgcttttacgagcttcccgactttctcctctgcttccgcagccgggtcattctctcccttaagcctccctcctgcaaaaaccgttcttccagtacattcaattgttttttcaagagaaaagcggcctgataaatcagacaaaccgccatattcgcgaacacttcatcgtttctggaatgagccagatttaaaaaccattccgaatggtcatgccgcagggaggccttccgcatcaacagagattcgggagaatccttatcccatagcctcaacccgcgcatacgcaaataatcttcatagtccagcagaagctcttccaagctggcccgggctacattggtcagcttgatttccgtttcacgggaagtggcggaagccatgctcccctccgcaatattctgcttgccggaacgcgccgcctgcaccatctggtcagtagtacgcgcatcacgactcaagtagcgtcgcagaaagctaccgtcaaatcgtaaatgatttgggcgttgcggaatgaaagaagccgtctgtagccgcctcccttaggcagtaaacgcccgtcatccatctgtcctcccttccctctccgtcccaaaggacccagccgtccccatcgtcccattcacgcgcttcatcgttttatggtacgatgaaaaaaagggagactcaatttttttctccccgtccctccccgcgaaccgggcggccagcgcccgaatccgccttttccgtcagcaggccttttctagaaggaccgcattctggaagccttcagccatgcttccagtttcctggaggcctttacctctttttcccgtttcttttccggcacggactttccggagaaagccttcgccagaaccaatgccagttttcttttcattttcattctatttttctatagggtttgctccaccgggagcggaggaattcaggaagaatccctgccgtatcccttcggggaacaccgcctacttactgtatgcaggaagtttagtccattagaaaaaaacgattccttgtcatacttgatacaataaggaagagaaagcccgcaggccgttaatcaagagacttttccagcaggtccgcatccttggccgcagaggggtcaaaggggcggcctatctttttcatctccatttccacacgctggtgtgacgattcgccctccatcatgacgtccagggagcgtttcagggaagccaggttggacgtgtaaagcttctgccgcgccgccgaacgggaggccagcacgccccgccggtcaaacagggccagcaccgtataaacgtccccgtttttccctccggcaatcaggccgacgccaaagaggggaatattgcccaggaagtcgtttttagccttgtggtagcggtaggtccacaagacgccgtttttcatggtcaccacgtcggagggctggcccagagcgtcgtaaacgtccgccttggaggattttcccggcgccagcctgccgtatacttccggggacgccacggatttgttgccgtatgtgacggaacaggcggccagggccaggcaaagggctcccaggaagggcaagaggacataacgcatctgcatggaggaaaggtacgtggcccggattccaagtcaatcccgcagcccatcatttcccgtggatgcaccggaaaggccgccccgggaagaagctcccgcccggaggccccccctacttctcgccgaagtcatatttctccgtcttccacaggaacatgcgccggtacaggtggtattccgtcacgcagaggacgggcatgccgatgattccgatgaacggcagcaggcggaacagatggcggcacaggaagagcaccaccatcaggaagctttccctgaatacggtcatgtacagggaatacgggttgatgagcgtcctcttgtacagggaggaggccagcagcggccccaggatgggaatgatgcccagcacgaccacggccgcaaaggtccagcccctgcggcgcccaacatacgcatcatactggtccacggattgttccccctggagcaccgcctttccgcaggcggggcagcgctggttcagcgtaggctcatggagcggctggccgcagtagaagcaccgccggtagctgcggaggacttcctcatgccttttccatccggtggacggaatcacggtgcgcagcctggaataaccaatccagttcagggcgcggggtttgggattggacgtgccgcacttggggcagtgcaggccgcacgggtacatcatggtgccgcatttggagcagaaaatgcggtggtcgtattcccggcggcggcaaaaaaggtagtaggcccccagggccagcccgcccaggaggcccagcgcgatcaccacccacggatacagcagggagtaggccaccaggtattccgtccaggagtggtcggactggtgcatgagggattccgggccgatggggttctgcgccacgtccggaaggccgctcacgtatttttcacccatgtccctcagcggccccgcggggagccattgttgtatgggaatgggttctctcatgatttggcatgcatgcagggttcacaatacagacaggatttccccccggtttccgtcaaaaaagcctgtgtcatccagcatacggcgtccccggcggaatagggaggggaaagtgggccatggacggaaaattccgccgggaacgtggaagaggcccttttcatccggggcttttccgtgtaatattcccgccatgccaacactccgccaagccgccaaggacgacatcatgctgattcatgaactggccctccaggcttttccggccacttaccgggacctcctttcccaggagcagatggatttcatgatggactggatgtattcccccgccaatctggagaagcagatggaggaagggcacgtgtatttcatcgcctcccatcagggggaggactgcggctacctgtccgtccagccggaaggccccggcgtcttccacttgcagaaaatttatgttctgcccggcttccaggggctgcacatcggcagctacctgttccgccaggccgtcagctacatcaggagcatccacccggaaccgtgcctgatgcgcctgaacgtgaaccgctataatacccgggcggtggagttttaccggcgcatggggatgcgggaactggaacgcggggatttccacatcggccacggttattacatgacggattacatcatggggctggatattgcctgaagcgtttttcccatgggaacgggccgccgggcttccccggaccggaagtgcgcagcccgtcgaaacagaacaggcgggacagccgaggaaacaaccggagaaggcagcgcggggcgcgagcttccttcttgacactcaatgcgggattctgcatcattcatcctatgaaaacctttactgccctcattctgtccggctccattgccgccatgacggccccggctttcctccacgcggcggacaacgggaacggcgccaaagtcacctacccatcctttgacgaaggcagccacctccacgggccgagaatcaaggcttccgacctgaaggggaaggtggtgttttttgaatactggggcatcaactgccctccctgcatcgccagcatgccgcatttgcaggaattacaggacaaattccaatccaagggtttcaccgtggttggcagtcaccgccaggggctgacccccagggtgaagcagttcctggaggaaaagaagattaccttccccgtctatcaggggctggatattccggcggcctcctgcccgggcggcctgccgcatgcggtgctgatcggggccaacggaaaggtggtggccaaggggcatcccacccagctttacgacctggtgaaaaaggaggtgatgaaggtggaacgcggccttcccatcctggaaggcgtggagctggacaagtacaaatccctggccaagacggtcgtttccaacggcagcaacatcgagtccaagatcacgcccctgcggaagaaaacggacgacgaggaggcccaggccgtctgcgccgcttttgacgaatggctgggagacgccaaggacatggtgcaggcccagatccagtccaacccgctggaagcggtgacggccatcacgcgcctcaagacggcggtcccctccgtcaaggagttcgacgaaccgctggcgactctgaaggcgaacaaggacctgccgaagctggccgacctcaacaagaagatttccgccctggaacagcgcaaggcgaaagggagaaaggtttctgaatccgacctcaaatccctgacgcaggccgtggacaaattcgcggagtccgataatgaagccacgcagaccgttgcgggcaatctgaaaaagagcctttcttccctggctgtgccagaggctccggaagataaataagcctttcagccgaacggcatttcatccggaacaaacaggcgtttacggacgcctgtttcttttttctccggaagcttttttcttcttcccggataagacatccggagcggagagaacggaacaggttgcccggacaaaggaggagagagcccggtcatcatccagttccgtcatcaggaaatgcggcctggcgccgggatagggactgccctgctcctgctgcggaagcagcttcaggcccggctccgtgattttgacaaataattggttgtcacataccaggccgaaatatttccggtcacagtacaggccgtattccccaaacatttttttgaaggaaatgtccccggcatgccggagctggaaacagatatattctacaacatccggggaagaagccatgctccatgttctcatacctgccccgccttctgcaagcagcaaactccggcctgcggcctaccggattggaaagccccggcacggtacggaatggggcgcttcctccctctcttttccgccgggatttctgcaccccggaatgccccgtcttccaccgcttccgcatccggaaccctgcattttttccaagagcaggcgcaggaacggccaaaaggcggtttttacccgtccacgcacattttttcccagtctccggaaattcggcggcgttctaataaacattgacagtgacggctaaaaacgccattaaacacgccgaagcaacggggaattccgtgagaaccggaaacagtcgcgctgcggtatcgggttacaaaccctcaaggaacgcttttccgccagcgttccggtcagccagtcctcccattccggagggtgaaggcgagggggaggttggagacccggagtccgaatatccttgctccggttcaccataccttatcaacgcatgattgaagcatcctcttacgtaccgggggcattcctgcccctttcctccgtttttcttgcaggactcaccctgttttccctgcctgtgctttccgccgccccatgcagggcggaagcgtcccccgccccggcggaacaggcggcgccgtcacggcaggaagggcttcttctcgtggccttcgggaccagccaccaggacgctaccgtctcctacaaggagctggagaaggacatgctggcccattatgccccggaccgcctgaagtggagctatacttcaagcattatccgcaggaagcttgccggacgcggaacccccgttccctccgtggaggaaaatctggaacagatggcccgcaaaggcatacgcacattgcgcgtccagtcccttcacatcgcccccggcgaggagttttcccggatggagaggcagatcgtcagtttcctggcgcgccatccggacagctttgaccacgtgttcatcggccgccccctgctggaaagcgaacgggacaggaacgaggccatcacggcccttctggagcatttccccgcggaacggaagaaggatgaagccatcctgctcatggggcacggccagcaggaaggacgctgcgacatggtgctttccgacttcgcccgcgagctgaacgaccgcgacagcctggcgtttttcgccaccgtggaaggaacgcggggggtggcccccattctggaacagcttaaaaagtccggcgccaagaccgtctggctggcccccttcatgctggtggccggagaccacgccaagaacgacctgggcggggatgaggaggattcctgggcttccatgctcaggaaggagggcttcaccgtcaagacccacctgcgtgggctgggggaaaacccgggcatccgcgccgttttctcccgccatgcccggaccacggaggacgacctcatgacccccaaacaagcgcattgacatggccagccctggaaagttctacggggtgggcatcggccccggaaatccggaatacctcacgctcaaggccgtcaacgtcttccgctccgtggacgtggtgtttacggtgaccggacccaacagcgatttcagcatttccgaagcggtggtgcgttccgtgggcggcgtgaaggcggagttccgcaagctggttttcagcatgtcccgcgacgcgagaaccaggcaggagcagattgaaaagaatacggccattattgagggagttctttcccgcggcctggactgcgcctttgccacgctgggagacgccatgacctacagcaccttcggctatattctgagcctcctgctcagccggaatcccggcctgcacgcggaagtggtgccgggcgtcacctccttctgcaccctggcggcccgcagccgccaaatactggtggaaaacggggaacggctccgggtcattcccgccttcaagccggagatggcggattccctggagttcccgcccggaaccaccaccgttctcatgaagacctaccgcagccgcgcgcgcctgatggagcgcatccggcgggaaaaggacatccgcgtcatttacggggaaaggctcggcatgcccgacgagtttattacggacgacatcgacgtcattgacgcaaggccggaagaatacctttccctgatgttcgtcaagaaggcatgaaccgcaccaggcactcccgcacctatccctggcgccggcccctccgctggctctggctggcgctggccctggcagcctccggagtcatggtggtccacatgcccgccggcatgggcgccgggggatcgggaaaagcccgcacagccatgaagcctgccggggaatccacccgggaaacgcaggcgggaggggaaaagacggaagccgccgcttccagccctgccccgccgcccaaaaagagccatcattcccggaacacccaggttccggagacaggcgcgggaaaaattctggcgcgccttccccagattggcagcctgatcggcctggtggccgtggcggccttcatcggcggcattgctgaaatcttccgctggcatcttgccctgggcaagctgttcggcggactggcccgctgggcccacctgccggaaatcatcagcctgtccatccccacggcgctttattccaatgccgccgccaacggcatgctggtgagcagccacgcaaaaggcaaaattactcattccaacctgattgcgggcggcatggtgaacagctacctttcctacgtctcccactccctgcgggtggcgtatccggtcatcggcgcggtggggctgcccgccatctgctacttcgggtggcagatgggcttcggcttcctgttcatagcggccgtgctgttcctccaccgcaggaagagccccgccgccgtgccggattccgggaatgccggcgccgtggccgccgcggagcacgcctccccggaatggcgcacatccctgcgccagacgtgcctgcgggtgctggcgcttgttttccggatgctctgcctgacggtccccctgatgatcggcgtggaatggctgatgaaaaacggcctgttttcctggtgggaggaacatgtgccagactgggtgaaccgcatttttcccgcggagctcatgagcatcgtcgccgcgcagatgggcggcctggtccaggccgcaggggtggccgccaacctccgcagccacggcatggtcacctcctcccagattctgctggccatgctggtagccagcgccatcggcaaccccatccgcgccctgcggcgcaaccttccctccgccatgggcatcttccccacgcgggatgccctgaccatcgtggtggtcatgcagctttcccgcatgatcggggccatccttcttattgccctgacgggacttttcatccactatacccactgacttctcatgacctctgaatttaacatccgctgggacatgccccccgccgccattgaggcggaaagctttgccgccattgaacgagagttccacggctgggaagagctgccgcctgccgaatggaaggtcatgcggcggctcatccacaccacggcggacctttccatcggcgaggggctggcgttccgccatgatcccattccctccgccctggaggcgctccgcaggcactgccccatcttttgcgattccaacatgatccgcgccggactttccgtggaacggctgaggcgcgcccatcccggctacgcacgggaggacatccactgccatatttccgatgccgacattgcggaacaggccaaatccacaggcaggacgcgcgccatctgcgccgcggaaaaagcgcgccccatcctggacggagccatcgtcctcatcgggaacgctcccctttccctggcccgcatcgcccggtacgcgctggaggaaggcatcaggcccgccctgatcgtaggcatgccggtgggcttcgtcaacgtcgtggaatccaagctgctgaccgggacgtgccccgtcccgcagattgtcctggacgggcggcgcggcgggagcgccctggccgtgaccaccctgcacgccattctggaaaacctgcccgcctcctaagttttccgcattccaaaaagccgtcccccatccatgtccgcccccctccgccagccgctccggaaaggattttccacaggagccaatgccgccgccgccatcacggccgcatggaaaacgctgaacggggaagaaatcaacggaccgcttcccctgcttttcccggacggggagacgagaacgcttccgctggcagactgcgcgccggggttcgcccgcatcgtcaaggacggaggggacgacccggactgcacccatggagccgtgctggaagcgcgcgtaagcgcagccgtgccggagcaggccgcccgggaagattatctcctgcccattggccgggccctcctcatcctgcgctccggcggaggcataggcctgtgcacgctgccgggcctggactgcgagcagcacaaatgggccatcaaccacggaccgcggcgcatgattacggacaatctggcacgcgccggcatgcgggaagggtgctggctggcggaaatttccgtgcgggacggggaaaagctcgccgggaaaacgctcaatcccctgcttggcgtggtggggggcatctccattctgggcaccagcggcatcgttcgcccgtacagccatgaagcctacatcgccaccatccgcatctgcgtgcgctctacccggctttccggcttcaggaaggccgtgttctgcaccgggggccgcaccgccgcgctggcgaagaccctcctgccggaatacccctccatttccttcatctgcattggggatttcattgcggaaagcctccagagcgcaggtgaacagggcatgacggaagccgtagtggcctgcatgccgggcaagctctgcaagtacgccgccggatttgccaacacccacgcccacaaggtggcccaggacatgccgctctttctccgcacggcggaacgccatgcgccgctttccggggaagcgcgccggggcatcctggcctgttcttccgtccgccaggcgctctccctgacgccggaagaggcccacctttccatttaccgcgacctcgccgcggaagcgcagcgccagttccagcgccacgtgcccggccttcccgtccgtttcctgatttccggcttttccggcaacctccttctcgacatacctccatgccacccctgactgttttttcctgcggcacaggcccgcttcaaccgtccccggccctgcttggcaaactggcagaggcacagagcatttacgcctcctccgccctgctggaagcctgtcccccttccgacgcccggcgcatccccatcggcaaaaacgcgcgggaacaggcgcgggaagccctggaagaagcacggcacggcaacaacgtagtggtgctggcctccggagacgccctgttccacggcatgggcggcacgctccaatccctggcttgtgacggagaccggctggaattcatccccgcccccacgtccttccaggccctgttccaccgcctgggcatggcgtgggaccgcgcacgctgcttcagcgcgcacagcacggaatatattccgtggggggaaattctggcccagccgctcgccgtcatctacggaggccatcccttcaccgcctgccgcctggccgcggcggccatggagttccatccgtcagcggcggggcgttccgccgtggcggcccaatgcctgggaatggctgacgagcgcattctgcaaggaaccctggcggagctggccagggaggaatgctcccctacttccatgctcctgctgctgccggacaaccgccccggagccgcgcccgtcctgcctctgggactgcccgcggatttttatgaaaaggagaacaacctgattacggcggaggaagtgagggcggtcatcctgtccaagctgcgccttccggcctggggggtgctgtgggacgtgggagccgggagcggctccatcggcctggaagccgccgccctgcgccccggactttccgtgtacgggctggaacggcaggctggccgcctggaactgatgcgccggaattgccggcgcctgggctgcgtgaattacacctgcatgcagggagaagcgccggaggccctggacgcgttgcccaagcccgaccgcattttcacgggaggagggggcgccgggctggaatccatcatgcaggcctgttttgacgccctgaaccccggcggccttctggtagcctccgccgtaaccacggaaagcgagcacctgctttacggctggaacgccgccgcacgcacggggatgttctccctggacatcgcctccgaatctcccattgccggaacctaccaccatctgcggcacggcaaccgcatcacccttttcacctattcccgcgcatgaataccgcccgttttcccatccatttcataggagccggccccggagccgaagacctgattaccgaacgaggcgccgccctcctgaaggaggccgacgtagtcgtgtatgccgggtccctggtcaacccggcgcacctcaagcgctgccgcccggaggcggaacttcatgacagcgccagaatgaacctgaaggaacaggtggaagtgatggcccggggcgtgctggaagggaaaaaagtggtgcgcctccacacgggggacccctccatgtacggagccgtcgcggagcaattcgacctgcttgacaagaagggcattgaatccatcgtggtgccgggagtcagcagcgtttttgcggcggcggcggccctgcgcacggaactgacctatccgggactcgcccagagcctggtgctgacgcgcaccccgggaagaacgcccatgccctccggggaggcctgcgaggcctttgccaagacgggcgccacgctggcgttcttcctcagcgcgggcaagctggacgaactggccgcacggctggtctccgccgggaaatcccccgatacggcggcggcggtggtgtaccgcgccacctggccggatgaaaaaatcatccgcggcacgctgtccaccattgcggcggaaacggcgcgggcgggcatcggcaggcaggccctcatcctggtgggtgacgccatcggcgcgcacgactgcgggcagtccctgctctatcacggccaattcagccacggctaccggaatgagaaggaagacgaacggttcgacggaagctgcgcgttttacgctttcacggaaaaaggagtccgcaaggcgcaggagatttcccagtccctggggaaaaccgttatccattccgtaggcagggccggggaaacggaaggtgtcaagcgggttcccccggaggacttcgacccgttgcttgcccggcagtggaacctgtttgacgcgcacgttttcatcggggccacgggaattgccgtcaggaaaacggctcccctgctccgggacaaggccacggacccggcggtagtttgctgttcggagtccggctcccacctcattcccctgctttccggccacctgggcggcggcaaccgcctggcgcgcaggctggcccgcatcagcggcggggaggccgtcatcaccaccgccacggacacgcggggaatcaccgcctttgacgaagcggcagccagggaaaaggcctgcgttctcaacccggacgccatcaaaaccctgaatgcggccctgcttgccggagacaccgtatcttttcacggtccgcaggaaatccacgaacggtactggcgggactgtccccaggtcattccggcgcgggcggatggagcggaagccgcggaaaaaccgtacgttcccgccgtctattgggatgaagagcccccggaatctgcggggggagctgccgccctgcttattcagtcatcctccttcgtgcttggaataggctgcaaaaaaggaacggaacccgggctgctgcagcaatacgcggaaggctttcttgcccggcagggaatctcccggtcccgtatcaaagcccttgcctcctgcacgctcaaggagcaggaaccggccatcctggccctggccgcaacatggaatgtgcctttccatgtctttgagccagccgagctggacgcggtggaaattcccacgccgtcagacgccgtctttgaaaaaacggggactcattccgtttccgaggcttccgccattctggcctccgggggtaaaatcagcactcctaaaaccgtttgcggcgggaacgtcacgctggccctggcaacgtgccctcacggcagccggaacaaggcccgtcaaggagccggaaatgtcatcgtcatcgggctggggtccgggtctccgggccagcttacgccggaagcggcggcagccatggagcaatgcacctgcatagccggctacaccaaatacctggatttcatccgggaacgcatccacggaaaaaagatgatccagaccgggatgatgggggaagtgccgcggtgcacggccgcgctggaagcggctctgaacggggaaaatgtctgcatggtctgctccggtgacccgggcatcctggccatggccgggctgctctacgaaatgaggaaggaaaacgaacgcttttccccggtccgcattgaagtgctcccgggaattacggcggccagcatttccgcctccgcgctgggggcgcccctccagaacggcttctgcctgctcagcctgtccgacctgctggtccctgcggaggaaatccgtgccaacctggagcaaagcgccggaacggcgctgcccgtggtcctttacaaccccgccggacgcaaacgccgccatctgctggaggaggccctgcgcatcttccggaaccaacgcggggggaaaaccctctgcgcctacgtgaagcacgcggggcgcccggcccaacggaaatgggtggggacgctggacgaattcccgctggaggacgtggacatgtccacgctggtgcttctgggaggcccccggaccatcagggacggagacgtcctttttgaacggagaggctacgccgacaagtacggaatatcctgacctgatccggaaagacagcatccgcagaatttgcctgtttcccatgaataagccttttcacgccttctgcatcgcctccacccagtccgggggaggcaaaaccacggtatccctcgccctgatggcggcgctctccgcccggggattacgcgtgcaggccttcaagtgcggcccggactacattgacccctccttccaccggcaggcgacgggattgccttccttcaatctggatacgtggatgatggggaaaaacggagtccgttcccaatgggcacggcacgcctcctgcgcggacatcgccatctgcgagggagtcatgggcctctttgacgccagaacgcctgaaagcctggaaggaagcacggcggactgcgccctcacgctcggcctgcccgtcctgctggtggttcaggcgcgcggcatggcggggtccattgccgccgtcgtccgcggcttctcccagcaccatcccggcctgaacatagcgggagttattgccaacggcgtgggaagcgccgcgcacgcggaccttctgcgccgggcgctggaccaccacaggatgccgccgctggtggcggcgttccccaaaaacgcggaatggacgctcccggaacggcagctgggcctggttcccgcggaagaggaagcccggcagcaatcctggttcctccggctggcggcagaggcagaaaagcgcgtcaactgggaactgctgatgaacatcacggaacgcagacgtccggaaccgctgaaagttcccctgccgcccgcccctccccgcgggattctggccgtagcccgggataatgccttctgtttttactacggggacaacctggaacggctgaagcaaacgggctgggacatcacctgcttttctccgctggaagacaccgcccttccggaaggaacccaggccctctacctggggggcggctatccggaaaccttcgcgggccgtctggaaagcaatgaggccatgcggaacgccatcctggaatttgccaagaacggcggagaaatctttgccgaatgcgggggatacatgtacctttgcaaggaactggcgcttccggacgggacaagcaggaacatgtgcggagtcattgacggaacggcccggatgggggaaaagctccgttccctgggataccgggaagccgtgatggaaacgggagccccgttcgggctgcctttcacccgcatccgcggccatgaattccattggtcccgaattgaactgaaccggccctacccgcccctttacacagtgacggacaagaatggaaacaagagccgggaaggagtggcggatgggaacgtgaaggccggctacatccacctgtactggggaacggaaaccccggaccacccgcaggagcctcagccggggctggggcgcgtcatcctgctcaacggagcctccagcgcggggaaaagcacgctggcccggaccctgcaccgcctcatggaggaggactccatgattttttccatggacgattatctggccatgagccggggaaggcatgaaaacgccctggacgccgtccgggaaaccgggctccccttcatcgagtccttccacgccgccattgcagaggccgcgcggaaaggcgccctggtcatcgtggaccacgtcatcggcgaatcccgcgcctgggttcaagacctcctgaaccgcctgagcggcattccccgcgccctcatcaaagtggactgccgggaggacatcctgctggaacgcgagcggaaccgtaccgaccggactccggacccggcccatgcggagcgccaatacggatgcattcaccagaatttcccgcatgacttctccatagacacatcggaagcgacgccccgggaatgcgcccagaaactcatggaacaacttccaccggaattcagggcgacgcaggaatgaagagaggaatggccgacggcggagaacaggtttacctgagagttttcagaagagaatatcttaaaactcaacattcctctgagccttgattccctgctgaaaggcatgcctgacgcattcaatccggctcacggtatcggccacggcgatcatttcctccggagcatcccggcctgtcaggacaacgacctttccgggggtaatttttttcaaagcatccacgacttccgcaacggaaatgaagccgtaattcagggggtaaaaaatctcgtccagaatcacggttcccacggactcatccgccagcttctcccgggccaccctccacccgtcccgagcggcggaagcgtggcgttcacgggactcttcatccctggcgcggcccgtaaatccggccccggaacacaccacctccgcattcggaaactgccggagagccaccacctccccataggaaccgtcgtgcttgataaactgaattacggccactttcccaccatgccccaacgcgcgcagggccatgccgaaggcggaagtcgtctttcccttgccgggcccggtcaggacaagaatgcgggagcctttcatgcccggcattatacagcccctgagagtaatacccaacccaaattccccttgattcccggcgtaaaatgcactaccgggctccgcattcccctgctggtcagggagaaagcatctccaccggcagcacaaaatttcatgaagcacaggcactcatgccatctccgcaaacctgcgggcagacgtgaataggactttacagaaccgccctcctcacggtagcttatgcccgcgcttgttgcatggagagatggcagagcggtttaatgcagcggtcttgaaaaccgccgtggggcaacccaccgtgggttcgaatcccactctctccgccagttttcagattttaagatgagtaaaacccttggtttctcaaggtttttcgtttccaggctgtagtgttctgtgctgtggcatgaatctcctgtatatcttttcaaaagggacctatatacttagtaacaagtaaataactctaatttttatctatcttccatgatccatgcgttcagatcgatatattccggtggggcggattttcctttcaagtcgtcaaaacagcaatccgccatgcgcttgaatatttccggatattgctgaatgaagttttttgcactcttgcattcatctttttccccccaaccgcaggggggcgagaaattgtaaatgatctggagagaatcaaggagattccggagattgttttccacttgttccgggttactgttgcttacatggaaagcgtacgcacaagtatcgattccttgcgcccggttttccttaagcagcaacgacggattgacccggagacgtttttcttgaggacagttttcctctgtatgccggctttcccggccgacgttccacggcattccaagaattcccgtccggacggaaggatagcgttttttaatgcatgaagcgagaagaaggcaggcaacggcttcttccgccctccctgccaggagaatgcgcttcgcatgcggggtggcggcgagaaattcaaggatatcccgtttcatgttgtccaaatggtcttccaggttccaggaagaataacggatacgaacgacgggacgccccgttgaatgcagccacggtttttccggggcgccgcagagagcaatgacatattcatccgcaatagaagagtccggcgccatgaatgaataggaagagaaccagtaattaccgtcttctctgcgaagaaaggtttcctttccccagtaatcccagcctatgacgagttttttgtccgagtattcaaggatttcgcctccatcgttgcaatttaaacgctttcccctgtttcccgtgatgcacaagccatccgtccaatcctgctggcgcaaatgaataagggaggaggcatggggaggagattgaaggaaggcggcttcttccttcttccgtaaacggtaggcgccttcttccattttcgtaaaggtttccacgccccatttatcccatttcaatgtgatttccactccggtcagagacagcacgtcggcttcatcccgagggccgtccaggcgcatggcccgtccattgctgattttcatgcatcctttccagtcagaatggatgatgtccacgaggtgttcatcatttccggcatctgtagaagcaccgttctgcattttccggaattcctcggaaacagtacctccccgcatgatggaagcattgcttttttgcataatcagatggctgtgaattccccgctttttcagatagggagctatgtcagcacacccgtgttccagcatgacggtctggaatagctgatcttccgcaaagccaaattgatagaatcccgtttgccttaaacaacggtacatggcttccttcatagccgcgcggtcggtttcccaagccagcagatcctccatgacccgccgcgacatgacttgagccggccccagggccagcaggaaggatttttccagataagggtatccttcatgccgtttcagccacaggccctccccacggtggcagcttgaataaccatcgggcaacagggcatgaaaatcggcaacatgccggaagtagtccgggtcatagaagtcatcatcgtcaatcttggcaaaaaggtcataggatgaaatatccaggccacggacggtatccataaagttggtaagctggtttctgttagggcagaggcgcagcgtcactcttccggcatcgatgaacggctgcacatggggaagcagaatcctgcgggccgtttcagccgaaactcccttaactgctgcaaatacatgcagatgtggatagctctggttcatcatgcagagaatctggcgaaggaggtcttccacccgcttgtatgatgcaatgcatgccgccatattgaatggccgtccaagtggccgtttttgagaaggagaaactgtttccgaaaccgtccatggtttcccatcgtcataccgcggcataaaaactcccccgtgaagcaacggttcgtcctttccctccatggaggcaggctgccgcccggcttttccctccctgaaaattttcttgaaaaacaaggcagcttcatccagcaggccatccacgccgatctgtccctcgtcaaacaaggggcccttgaagtaggagaggtattcgtcaacattcctgtccaggtgctccacataccggaccagttccgcatgattgcgaaaatcacgagcattgatgaaccgcccggggttgaattcgcggcaggcatccggtgctccccagtagacgggcaggcttccggcagcaaaagcatccgtcagtttttgcgttatgtaaccgggggaagcatagttttcaaacgctatggtgaatttgtaccgggagcagaattcgactttgtctttaacgatcatgcccgtgttgttcagaagctggccggaactgtctacgtatttgtattgggaaagagtttccaaaaaacggacggcctcccggaattctcccccggaatagacgaaattacagaatttttcatgccgattgagaatatcccctggaacggaggagtattgttcaatgtgacccgtcctgcggatatagtcggcgtttaaccacgcaggaaaacgaaaatgacggtccccggaaagcgttccatctctcaggcttgtcagggaatagcatccttccttccagcgcggcaaaacaggttcttccgtataaaacagacgaggacctttaaaggaacgtgcggcatttccaaagattgaataaatcagcaagtcggcacgggccaggtcatccacaaaaacagcgcccaaacgttctttcaagatcaggcccagaatgtggttttgcggtttgaacccggattcaaagtcggtaaaagctacgcaaacgggagagtccatccgagtggcgtgagataagagtttttccgagaaaacatgcgatttcctgtccaaccggcatcaaacggaactagtccaggcggagatgcgcatacgggctttttgcctcctgcaataacggcagaatacgagagagaaagcactcctgcagagccggattttgagaaagagggatgacttcatcgtcatgaaattcccggatgacatttttgtatttagccgctttcatgaagtgcatccagcaggcatcaggataaggggtcacctgcggatgagcggttatatccacttcgtaaagcgccgcaattccaaagcggggcaagttgttcatgccgcagatgagggagtcgccaccgccatttaccggccgaggaccataaatcatcaatctttgctgatgaaccagggtattgtgcccccggatggagacgcaatcctccggaccggatatcatttgaaaggccgcttccagttcccgggtaaaataaatttggtcagcgtctattttagaaacgcaaaacagctgcccttcataaagacggcgaatgaattccatgccgaaattcaagtaggtgtcaattctgttttcccggggaaggctcctcaagtcatccacggaatgaggaggaacgacatgatgcggataatgaagaaagctgacccggcattgacaagcgtggcaaaggtgatgttcccattccttgaccagatcaatgctgcggtcatccatatccgcccagagcaccacaacgtggtccagaacgggagctacgctcaacaaacatgggataactgcgttttcttcattgagaacacggagaaaacctatccgtttcatgttttcggccaattttgttttttgtgattggcattccatttttttgattagggatttttaattattgagggattttgcgaaacgcctaggcggatatacgcagatttctcacctccccatggttcccgctttccgtttccatcatccggaacatttcttcaatccaggattgaaccaatgccggcttttcctttaccagatgtacgatttttccgtgaacaacagtatgatgttccttgctgccagcctgataggcatatgttttcagaaggtaaggagccaatctgttcgtcgcttcttcatcaagagtccaatgttgactggtactgtaaaaggcaaacaaacaaagtccggaggattccggctgctgaagcagtttgagtggatctccataacgctccaaaagatttttaaacggtctttttttccttatctgttcatgagatggggaaacttttattccccggtatacaggagactgtccacttaaatccaccggccatgggcatccccacacgccaatatgaagatgcgggaaatcctttttcaatcgctgcgccagaataagggctgcaaacgcatccttgcaaatccccatcagcaggacggattgaagccggggcatctttcgtattcctttttcaacatcacgatacatgcgttccagcagcagcaacccctcccattgatgatacctcatgccgataaaaggacggctggaatgccggaacacggagttatagccgtcatacgggttgatgagcaattcccgcgcgtatttgttcacttcattgatggtagaagaataatgatagtcaaggtactgatatttaccctcttccatcctcagaaattcttcagtcccccagttatcccatttaagaacgagtttgttttcatcatgttgaagtatggttgcgtggtcattgcggtgaagccggcgtccccgtttttcattcatctgaaattggtctgtccactgaggatggctgatgagaatggtgtccacgggaagcaagtccggtgcgggaacattcccctgggaagaaaccggcggcgccggggcggagtaatgaaattcaccggcggcatcttccagaatgggaatgactcttccgctgtcaatgagggactgcatgtaggcattttccgttggcgcatgatgctttgaagaacccgcagccctcaggttcatatccgtatctcccaaatagtaaagctgggcttcagggaataaatagtccgccagacaaagcgccttgctcaacgtggtaaaattgcccgtgctgcggtgaacttcccccggcatgaatttccagttttccagcccttccctacaagcaaattcattggaatagcccaattcttcattgttgaagtaaatttccgggactccgcgtaaaatttccatatgcctttcctcaggggaaaaagccaggtatccggcgaagcaggaaacaagaacaatatccgtcctttttcccgccagaccggaattcaagttatccattttgctgattctcattactttgtcgcaagagtcgacaaaagaggaatagttgcgtttcaaatcacgtttatttgagacgatgcaaatgcgttttttatgcccttctgaagccagaaaacattgccagtctttaaattcacctaaccgtgacaaggctttccactcttcttccgtatcaatttgcagacaacagggaaaatcattcgggtaagggcaggagccgtcatcaaacatcgtacccgattccagaaattttttccgggtaacaacattaatatttccgtcaaaaaaatagaaaaatttcttggcgtcctgttcccgatgcgccagatggaaatgtccctccatgtgaccaatcattttggttttgcgggccgtgtaggcggattgaattttccctttttccatgtcttccgccatttggcgcaacaggccccgacgacggaagggagaagtcggctgaagtacggcgaatatgtcacaggagaaacgggtcaatacctggcgtacgcaattttccattcggcggtcgtccaccgtctcccggaagcaccggatgccttcccgacggcagcgttccagaacttcttcactgtccgtactgacaaccggaacaaatccttcctggagggcataggaaacggaatacaggaacaggggccttccattcaacaagcgcctgtttttatccggacagcgctccgaatgttttttagccggaataatggccagcttgcggatgaattgggaagccgtgtccttcccttccggacagaacacgggaaacggagttgccgccagcgattggggcagcagaagttccgcctttcccgtccattgttttccgtcatcatgacgggacatgacgggatagccgtgatgcagacggcaagcctccgtacgcggcctgccagtccggcatatattcccgctgcatgaaatcatggaaaagaattctgccagacggttcatatattctccgatgtccggctggcccggtacaaaaacgggaccgtccatataactgaggtaaaggtcttcatcctgatcaagacgaatcacatattcagccagggcctccggggtggaaaagtccgcggcattgacgaaccgggatggattggcctccatccctgcatcgggggctccccaataaatgggaagggaaagagcggcaagagaatcaaacagtttttcagtcacgtaaccagcagccggatagttttcaaaggcaatcgtgaatttgcaggaggagcagaaagctattttatcccgaacgcaggagcccatgttgttcatgaccatcccgccgcaatctacatgcttgtaccgggaaagcaggcgcaggaaatgaattctttccggagcattcccattggaatacacaaagctgcaaaatcgggtatgcctggacagaagggattttctgtctttggagtattgttctatttttcccgttcttctgacagggccattgttcatccagcagggcatcctcaaatgacattcgggataaggaatatctcccttcatgaatgaaatggcataatcgcactcatcccaacgcggtttgacggattcccccgtataaaaaactcgaatccccttaaagttctgatgtttttctccaaaaacggagtagattaaaaaatccgcctgatcctggtcatccacaacggtcatgcccagtctttccgtcaaaaccgcggacagaatattatcatgtggatcaaatcccggccagaagtccgcaaaagcggcacgtttgacctgccgggaatttatatctgttgcctcaaccatgcgtgacccccgtgtttttgaagagatttatcctttacgatcatttttactttcggtttgatcgccatgagatttttttgattaaagtccaatgtttcagggaataaatattcaggagataaaacaaggggatgccggccaatcacatatttattgaggtggctttcatcgtgccaaacggcaatgacaccgtcctcaagatcccgcctgacggcatccgccaactcccggcacatgcggagatagtcttcagcccttcccccgttaaagcctccggcgacataatattctccttcggaatggagcacccgcgcccgggacattccatttttttcgtaggggtaagtggaacgggggcgttggtagtaccccggatgaagcgtcaccatgagaccctgccggttcatcgggaaaatttcctgaccgacaggccctacgggaagcaaagttccattcatgaaataaatgtagtcatattgctgcaattcctcccgaacggttaaaaaagtctcaaaccttctcaaggtttccatgggccacggataaaacggcttgcggacaagagtcacgtcatcgccggtttccacttccggatgatccgtgaacagaaaataatgcacatcatgccctgtcaggaaatattgtttggaggccgcataaaactcctcccagaacgtcatataacgccctgtggctataaacaggacagccacttttttccggggagaaaaaggttcctcctgtctgccgccgctcgacaaatagaaggttccatcctccatctttttaaacgcctccacgccccagcaatcccacttgagagttattttctcatcagtgacggagaggacgtccgcttcgtcgtcccgttcaaaacggcgcgccctgttcccaaagacacggacaatatcatgccattgcggatgatgcacttccatgagacgctcctcattaacctgattcgtagaaatgttccagtttctgccccggaaatctcccggaaccagccctccgcgcatcacggaagcattgccggtctgaatcgccagatgcattggcagggccatttcctgtacataccgggtgcggttgctgcttccggtatccagcatcatcatgtgcatgaagttgtcttccgtaaatccatacccggcatgacggagcctgggcgagatctgggatatcatgtgaggattggtctcacaaattattaatttttccagcacatcccggctcaataccaaggtggggccaaagcagccgaaaaatccgtttccggagaagggataccctccacgcacgcttagatattcgcccggcccgcaataaaagctgctgaattccggcggaagatgcagatggaatttattgactgacttgaaataatcccttccgtacaaatcatcgtcgtcaattttggcgaaaagatcgtaatcggaaacgttcaaatcccttatcgtgtccaagaaattggatagctggttcttgttggggaaaagccgcatcgtcaaacggccttcgtgaataaaatgttcaaagagagggagcactgttctgcggtacgtgccttccggtatccccttgacagctgcgaacacatgaagattcggatagctctgatccatcatgcaccaaatctgcctctgcaaatccgtcagacgcttataggatgagagacaaacagcaattttgcaatcgggtctctgcttagtccgttcgtgctggtaaaacagattgtggcgggccacacggatcttgaggtctccatggctgttggcagcctccagggcaatatcagtcggcaaccggtaatcggcaaaaacccgggccaccctggggcgtcgggcagcagggatgacgagagcatgcgttccccatacgtaggaggtattggcatccgtctttcccgttttgaaatcttcaaacaagatttcatcagattcccccggagccccttgcggagaccatactgcatgatggaacagccggaaaatatccgtctccggatgctccttcatttccttcctgagagccgtttccaagcgggaagaagccaccatcggcacggcatcgctttctccgaaaataatcaggtcactcccagcataatttctgtcctccagaagacgtatgaaagatgccctcagagaacggacgtgcgaacgttccgcagacgccggggaccgtcccaggtaggatgcactttcctcttcccgcgcatccctgaggggggaaagatccgcggtagagggatagagctccagctcgtaacccatccggtgcaattccgaagctccctccgacttttccccaggagacacaatcaaaacacatttcataaaatgtacctgttaaagtttaatccattgcgggcagaaaatgtcctgctcgtcctcaatctttccggtaaaccactgtttttgaataaaaaccctctgctggtctccaagccatgccccccaccaggaaaaggaggaacaggaaaggacgagttcctgcatggacgtcaattcccggagggcgtccagcgtctcatgctcatccatgactatttcaaaacgcgttgcttccggaacgccctccatcaatttccgggccaattccggagaatcggaaaagacgaccagcttactgatgttgccggaaagcctccgtaaagcttcattaagaaagggaacatccggcgtatggtacatgtctgtacggtcaagatagtcccccatccttatatgaacgccggccacgccctcctggacgggagcaataagaggagcaaacagggaacggatttcttccgcaacatccttgaaataccgctcactctggaaataccctctcaaggcgccgtagcgaaccgtttcaggaatgggatggtaggaaaatccgggctccctgtatgtcacgggatcgttatatccgccgtccgggcacagcgaacaggcctcacccagataagtcatcagctcccaggtctcggaactgtatctccagggaatacggcatcccacacccagccggagagcatgcgcataggcagcagctatctggaacagatgattgcacgtacgcgagccgggcataaactgcgtcgtgacgtaaccgggagatgccggaacagaagcgggacgcaaggataaaaatttaccggtaacagtcttctgcggtttccgggcatccaggcaaaccgtgcccagcaggtcaaaaggatgttcatccctgtcggatcgcctttcaagacactgaaggtgcaaatggcgggaattacccggagcatgctgggaaacctggaaccccagctcttccaaaacataactcaggaaatcggcagaccacagggattgttgcttgtagacttccataaatgcacacaaatcattctccggagtgtgatttcctttcccctgtttcttcatgtattgcctgaacgcaggcgtcatcaccccgcgcatcaggcgcacgtcccggaaacttaatcgtaagattcctccgggttttagagcacggaaggcttccgtgaaaaatcggcaggcctctgcagacgttactgttccaatgacatgctccagataaaaagcgtctacggaatcgtccttccacgggagtggcctggtaatatcataattgggagcgtccagattcaaccagccattcaacctccgggtgccgcaccccaaatggatatacagcagaggagattggtccatgatttccacgttgccgaaagaaagacggcgttcagcccataaccgggccagggacggcatgtccgaccgctggaatatctccgtttcagacccgataaaccgttctccctccaaaaggagctgctccataggccacatctgccatttcagcttcagttcacccttggagccaatgctccaccagccatagcaggaagtatcccgcctcctgaacgccccgttggaataaaacagcatttcccctttccaatgaagatgaacaacatcgcacacagcggagggaattttgtaattaaacgaatacagggcctgcatgatgtcgggagaacaccagtgggccgttaccatgtcattatcccgttccgggtaataaacattggacatgtaaagccgtttcgtggatttcaagcggcctccgagcctgcctgccagttcacctacgatcacatcctctgccccgcattccgcaaaacccggcgcattcaccagcttttccaccatgctgcgcttcagcaggtagcccgcccctccgctcggtgaattgcgaagcgcaaccatcgcatccccaatcagatcataatcttcatctatcaaggaggtcaaccggctcaattccaaatacgtatcgtcatcacatttaaagagccattcaaattcgtaattctccagcgcgtaacgaaagaaggatttcacttttgcggggagctcattgtagccatcgggcgcatcaagccccaccgtatcttcttcttccccctccggaacccggtttcctcctacaaagaacatgcattcaacgttctgcgcgggatgggccagccaggtagaccttaccgctttccgtttatctcccgttccatggcatgaacaaatgcctacgacaatatttgttttctttttcatggtttttcctcccatttctaagccggcagtttttccaccgcgtcaaagacttcctcccagctggctacagacgcttccagccctccaagctccagtccacgctcccgcgccgcgtgggccatgtcggacctcaggttgggctcgtaggccatcttgctggcgtagtagataaaatccctttcatggtcgcacagccatccggtcttgccatgctccaccatctgcctccagcctccacggttgtccaccacaagcacgcttccgcttgccatggattcaaaaccgacacgcggccagttctccgtcgtgtccgtcggctggagcacgatttggcagtgcttgtaaaagtcctgctggctcacctccctctggtcgcgggccgtgcgtatccaactgtaaggctctccgattttctcccggctcctctggtcaaaccccagaaaaaggccacgcttgaagacaggcgccacgaaatattcataaatatggagcgtattggccgcaaatttgtccgcgtcctggcgcgagatgcgcccgcagccgaagtattcctgcgtcctctcctcaatgaaagggaaggattcgttgtggaagtaaggcttgaacgtcatgaaagcaatggtagggtcgtcgttgcagcgcttgagcaggggcatgttcttctgcctgacttcctcgttctggtaaaggaacatggcaatgagcccctgcttcatgagttccttttccttgttgaaaagccaggtcatgcagttgacaaagatggtgcgtttggtgcgctggcgaatggcgggcatgttttccagaaattctccgttgcaaaatccgatgatggcatccccttcctgcaggactgtccagtcattgggagcgtggatatggacgcccagacggatcatttccaaataaagggcttcattttcaaatccgccgttggtggggatgatatgcacgtcaatacccatgtggagccagaccagaatctggtggtggagttcggttcccgcgcccccgtagagactggggaacccgttgacatagatctttttcaatgtggtgctcatgaaataatggagttagatgttgaacgaattcattgatggacgctagcacgctgccttttaagctggcaatgggtaaattttgaaaatatggcaaagaaatacgtgccaccggagaagaatcccctcccttttcccacgttgccatccgcctcaaaaactcaccaaatatcataacgttcccgacgtgtttacgttgctggtttttgattcatggtagtcgcaaccattgaacaaacatcatttcattaccatgaacaacactttcaatatcggcgccatggacaccgtctatcccttcattcccatgtaccccaacggacagccccagggcaacttcctggtcaacggactctccgctcccgtccttatccccaaacgaactgcttccaacaacacccggcacgaatagtccggatacctcaaggtcatggctcccgccacctgttttctccaccttcacgcccactcctccatctccctttccatccccaccaaggatctggaactctccacggagccgggttcagacgcatggtataaccgaacatcattgcttatattaattttattatttattttaaatatattatattttttataagtattttattatatgatgaagaaaatcaaaatttgagtaaatattatagcttgcactctttctcttattttcatgattatagcatcttcaatgtgctgggtgaagccgtggacgaacgcggcgcgctctcctgctccggcatgaaaagcattcaccgcagcgctccgccgctggacgagcaatccaccagcacggaagtgctggaaacgggcatcaaagtaatcgacctcatctgccctttcgcaaaatcggcgccttcggcggcgcggggggggggaacgcacccgtgcagggaacgacttgtacaatgaaatgatagaatccggcgtgattaacctggaaaagccggaggaatccaaggtggccctggtcattgatggttttacagtgagccagacgaaccatgcgggcattcattcctcgcaggaacgctcctatacctctacaggcatgattctgcatcagacggatgcccggggcaatgccacaacgattgaaactgacttagacggacgaccagtcaaatccacggatgcagccggcaacgtaaccaccaccagctacctgccctgctgcgatgctgtggcttccatcaccgattccatgggaggtactacttgctattcctacgacatccagggaagaaagatagccgaatacggcacgtccctccagccggccagtttcgcctacgatgaagccgatcgtatggtctcactgactactttcagggtggacgaaggggacatcatcactgatccttccggccgcgccgacggggacactaccacctggctctacgacgaggccacgggaatggaactgaagaaaacctatgccgacggctcctgcgttctcagaacctacgaccagttcaaccgtccggaaaccgtcaccaaggccagaggcattgtcacgacgtacgcctatgctccattgacaggagaacttgtctccgtctcccacagcgacgatactccgggatgggagttctcctgcaatcatctcgggcagatgacttttatccgggacgcctccggcctccgggaactttcccatgacagttacggcagaatggttcgggacacttcctttggaacggtagaaagcagccttcaggaagacttcgacacgttcggacgttccaccggctaccgcctcatgaccggaacccgcacggtgcagcactcccatcttgactacgatcggaaaggtggcatgattgggatgaatctggatggtttggcctcttccttcacttgggaatacgatgaaaccagcggcttcctcaaccggctcacctaccccaacggcatggttcgcagcaacatctatctaccatcccaagctcaacctcgtggcttccattggctatgagaagcagggaaatggaggcatggccgccggccatgaataccagtatgatgccctgacgcgtccagttcaacgccgggactcctgggatggaaccactcctgccacgctaagagattttacctacaatagccgcagtgaattgactggagatcaactcagggagagaggcagctacagctaccggtacgacaacatcggcaaccgcaagactgcacgggaactggaggaagaagtatcctacaatgccaaccggctcaaccagtacacggacattaccagaaatacggaaccattcattcccacttacgatgcagacggtaatcagaccaggatcaagacctcgacaggcatttggaaagtgagctatgatgccaatgaccgccctgtgttattttactcaagaagacggaagaaccgtgattacttgctcctacgattaccagggacgccgctttgagaaaaaagtagcagttaatggttcaactgtcagccatgcatggtatctataccagggctatttgcaaatagctgaactggatttgatgcgtccttcttacagacttgtgaagacctatctgtgggatcctacagaatcgactgctacgcgcatcctgatgatgaccaactggaaggaggatggaacaagtgtcaacgagcatctttacttcatgcatgatatgctcaaaaacgtcacttccatcttcgactgtaagcagacgcgaagggcgcgctatgaatatgcctcccttggagccctaatcacggcgcagggcgacagggctcaggaaaacaagttcaggttttcctgcgagttcatggacgacgagcttggcctgatctactacaattaccgctacctgaatcctacagatggcaggtggattaacagggatcttattcgggaatacggaggacgaaacttatatggatttatcaaaaatagaatttttaaacaacttgattaacttggtctatatatattaattaatgctactgaatctgtaaaatacatatatcatgatggactggtttttccttcaaatttgtcagatgcctatgaaggaacaataggtcattgtccaaaatgcggatgtgtgttagtatggatccatggttataatactactctagcagaagcgatgacaagatttgaagtggttgaaaaagcttataagagttcggaaggaaaatgcgatgtttatgggtttgcgtggaacgggaatcctggtgcttcaaactttaaagacgcggtaaaaggttctagatttacaggatcaggtgcattttctcattttcttagagatttaaaagccaaatgtcctaacataaaagtacatatcggaactcatagcttaggagctggagtagctcttgaagcattggctcatggggaagatatcggcaatataggcaatgttttcttggccaatcctgcagttgacaatgagtctctggaaccaggagaagaatttgaaaaagctcctgctaatgctgattctattcatttagcaatcagcaaagaagatgatattttagaattcgtttatccactttctgaattcaatgtggctctgggagagaatggcccagatcatcccgaaaatgtgccagcaaatgtaataactcatgattttacgaatgactttggcgacaaccatggcgctgtttatatcccttctaataattcgaatttttggaatatagccagcggattatttaaatgatgaataaattacgcatttctcataatttaattatgctagttttctatgaaaataaaaaaaatgaacaataaattgggaatagtaaaatttctggttggagttagtatatttataattacattattcatattttttcctcttccgttggtttatacctgtctttatatcaaatatagcgtaaatccatccgacataaccccagaagtttttgaaaaaacagttgataagaaaccaaaagatttacatagcttgttaagcatttttcgtaagaaaagcacatccatgaatcaatatctttctaaaatgaaaaatattgatgaaatccgcgatgacttaaagaaaggaatgccatacctaatgaataaggttaaatttgataaaattaattggttttttagtgaaaaagataaagaaaaagtaaaatatatatacgacatccccctcttctcaacatggtctcaagcagagggaatgggtaattatgatgcagttggttacttttttcttgatgatgaattgaaaattctaggatggagtataggatgtatgatattaggttcccaatatcttgagggaagagccacgcctgatatttataaagtgcatccaagttatatgattccgatacatatttttaatcccaatgattctttattgaaggcagaagagttatccaaatttgcttgttgtgttaaatgaaaattaaagaaatatcattctgtaaaagctgtttacaaatcataaaatattatttacctattttaaatataacaaaaaatctatgcatgattcttgtttttttcataaaaatcatccacatgaactttaaaaactacaagtatatcataaattatttaacatgaaaactaatattatattcctttcgatttttttagcattaaacttattaggatcttgtacatccataacccccaaaaaagaagaaacaagaaatccctatattccaccttattatctacattacaatactcctgcctacattgtaggaaaagatatgattagaaattcattacaatcatactgggatttgtcgtcaaacatgactccacaaccaaatcttaatccgtatgataaaaaatggaatggaagcgaagcagcccttatgttagcggcagctatcggggatattgataccatgaagaaattactcgaattaggggctgatattaatgttgcttcaaatgaaatgaagctaccctctatgacctttccctacaaagaaactgccttacattatgctgctcgtacaggacaaataagtgcctacaattttctgattaaacaaggagctaaccagaatttgaaaaatactgacagaaaaacagccaagcaattactggaggctaaattaaaaaataattaaaattatcctgtctcttcggaatgaaatttataataaaatggataaaaaataataagaaaatcagtttctctattatagcattattggctttgctcatctttgtcctttatcctggcaatgatattacatgcctggacatagtaccccctgcgacagccaatgttcaatctgcccaggccggagatgtgttaaaaatggatattccccattcggaacacaagctcaccttgattttcattccaaaaggaagttacccaattacaaaatctggccatcgtacggaaattacttatccctactggctggggaagtacgaaatcacacaggaggaatgggaaaagatgatgggatggatcccgattccggaattggaagacagatggaccatcacaacgggcgcacggtaccccatgtgccaggtatcctatgatgaatgcctggatttttgtgatcgattaaccgagattgcacgacaacaggggattcttccggaaggatattgcttttccctgcctacggaggcacagtgggaattagcctattcctgcggcaaggaaatcgttcttcccgataatcttgagaaagtagcatggatggattttcacgatgccaatacaggggcctatcctgtgggacaaaaagaacccaatgcatgggggtttcatgacatgttgggcaatgtatgggagttatgtgcggatttttatcattctcatcgtttgcatggccgcaatcccgtcaactggaaaacggataccggcaatttatcaaccgatactggtttatcagtcacctccctcgggggaggagtgttttctttcatacctgataatgagaaagagatacctcgtgaaagatatcatgctgattcaagaagagccagtaccggattgagagtagcgttagtcccggttcagcaacatcaattactgaaaaaaaggttaaaacacttacaccctgttccggattggttgatggacattaggtactcatttgaactaatctacatgtatatgaaaacatattggaagactttaacgaatttatgatcatttgaaaaatattcctgtttttgttttggactatttcccaaatgccgtaccagtttaacagccaagcttggcgattgtcgttttcagacgcaggaaatgccagtacattgtaacacggatagtgttcggtttgacagcagcgaacgagccggctcctatttccggcaaatctgtttcccttgcgctctgtgaatgcactggttaacgaatttctcgcagtctttcacagcagcagcactctggaaggaagttagcctgcggtcatctggggcggtaagacgcctacaaaactagagaaatctttacgatgcctacgagaagggcgctgccatcctgtcttttcagagaggactcatcagaatagcgtgaggaagaggattttcggaaattcccatcatcttattgcacgctgcattaccggcgctgatcacttgatttccttctgcatgtaaacaatgtcaaaggtgcggcccagtttaaagccgatgtttttcaggcgcccggcatggataaagccctggctagcgtgaaaggacatgctttgttcgttttcagaggatatttccgcaatgatgtggcggatgccctgcttcacggcatcctcttccagacggcccaggcacatccggccaatgccccggccaagatgggagggagcaatgaagtaagtgacggtggccgtttcccggaatgtgggtacaggcttatacgcactcaggaagcagaagcccactacttccccggtccggcagtccaccacggcatacgccggataacctttcacgcgttccagaatatggggataaaaggattccggcagttccgcatccgagaaagcagccgttccgttcatcacgtaatggttgaagatacggatgacggcctcccggtgggagtctgccaacggttcaaatactattttttccaccatattcattgcttattgtttcaccgcagtgcaaagattttctaaagaatggctttcatgcctttacatccgttcccgcctgcctctccggtatttgccaaccactgccgcaggaataaaagggcttatgcggaacacagccttgcacttcctttaagacatttccagcagtaattccgttccgccattttcagaatagctgatttttcctttaaaagcatttcggcgccctgtgaccaggccaacgcccgccgtcagcctccatccggtccttttctccatataaaaggaccgttccagtaattccggaacggtcctgaaagacaaggtttttgttttaacgggttacacgctgtccggttccagctcccggcggatgtattccgccgtgggggagttctttttggctatctgctccggggttccttccgccacgatggttcctccggcttcaccggggccggggcccatgtcgatgatgtagtccgcctccgccatgatttccgtgttgtgttcgatgacgatgaccgtgtttccctggtccgccagacggtgcagcacatcgatgagcagccgcacgtctcgcggatgcaggccgatggaaggttcttcaatgaggtacaggtcgccaggcagttccttgcccttcatcagggcgttccggctgacgcgccgccccttgatgagctccgtcaccagcttgagccgctgggcttccccgccggagagcgtattggaagcctgccccaaggtcaggtagcccaggccggtttccgccagcagtttgagcgggtctgagatgcggggctggctttcaaagaattccgccgcttccgcaaagtccatctggagcacgtccgcaatggttttccccttgtacctcacggtcagggtggcggcgttgtagcgcttgccccggcaggtttcacacggcacgtagcaggggggcagaaagtccatttccagcttttgcatgcccgtgcccttgcaggattcacagttaccctgccccgtgttgaaggaaaagcggccgcggtcgaagcccagtctgcgggcgtccgccgtttgcgcgaacagggtccggatgtcgtccaaaaagcccacataggtggcgggcgtagaacggggcgtcttgccgatggggctttggtccacgccgtacaccatgcgcagcgtgtcaaacccggaggaggttttccacagctttttctggtcccgagtgagcttgtcgccgatggcctggcgcgccgccagccggatggttcccgtcatcagggaggttttccccgcgccggatacgccggtgagcaccgtcagccgccccttgggaatggccgcattcacgtccttcaggttgtgcaggcggcagccctccacccgcagccacgcggtttcatcttttctggccggaaccctgcgccttttcccgcggtagggatggcgcggcttatgatgcagggccgcgcccgtgacggagtccggcatggctgccagttcctcaaaggtgccctgagccataatcctgccgccatggatgccggctcccggccccatgtccacaatgtggtccgcacgcttcatggtgtcttcatcatgttccacgaccagcagggtattgccccggcgcttgagttcatccagtgtacccagcagcagttcgttgtcccgcggatgcaggccgatggtgggttcatccagcacgtaaagcacgccgcgcaggtgggagcccagctgggatgccaggcggatgcgctgggtttccccgccggaaagcgtcgtggcgctgcggtccagggagaggtagcccagccccacccgctggaggaagttgaggcgctgcgtgatttccgccaccacgtcacgggcaatgagagcttcctcccgttcaaatttccatcctttgaccagttccgcggcggctacggcaggcagggaggcgatttcaccgggagtcactccctgaagccgcacggcgcgcgcaaattcattcaaacgcactccctggcaggcggggcagattttcacccctttgtcatcgtccgcctgccgcgccagttccttgtcatatttcagttcggcttccagcagagattgcgcctggtcttccttcatctttcccttgcccacgatgccatgcccgcggcacacagggcaccacccgcgtggagagttgaaggagaacgtgtacggttccagttccgggaaagattgcccgcaggaggcgcacgcaagcttggtccccatcaactccggccggctggaaccgggcggaagcacttgcaggaaaccttcccccatttccagcgcggcatgcaccgctccggcaagtttttccggggtccaggaggcctccggacgtgaaacgaccaggtccaggtcatggctggaataacggtccagcggctggaatccgctcaacggaaccaatttgccatccacccacatttcctcatatccctttccttccgcccagcgggccaggtccgcgtaatgccccttgcgtcccctgacgaggggagccagcaaggccagactgccgtgttttttcagctgccgcaccaccagctccaccacttcggattccgatcttttgcccaccggcacgccgcactgcgggcagtaggcctgccccagcttggcatatagcagacgcatgaattgccagatttccgtcacggtgcccacagtggatttggtgccgccgcgggacatgttctgttcaatggccaccgtggggggcaatccggtcaagcggtcaatgtcagggctttccagttgttccgtgaattgccgggcgtacggggacatgacgtccatgaaacgccgctgcccttccgcaaaaaagatgtcgaaggccagggagcttttcccggagccggagagcccggtcagcacggtcatttctccgcgcggcacgtccaggtccacgtttttcaggttatggtggcgcgctccccgcagggccatcacgccttccggtatgtccacgtcagcggattccggcatagcggcgtccgccggatcgtaaacggaagggcgcccttccagcacatcccggaggtatttgcccgtatatcccttcccggaggctacaatttcctccggcgttcccgtggctaccacatggccgccgcctgcgccgccttccggccccaggtcgatcacgtagtccgcggatttgatgaattccgggttgtgctcgatgaccagcagggtgtgcccctgctccaccagttcccggaacacggccagcagaatttcaatatcggcaaagtgaagtcccgttcccggctcgtccagaatcagcatcttggggctgttcgcgccggatccaatctggtccagcaggattttagccagcttcaaccgctggttttccccgccggagagagtgttcagcggctgccccagggtcaggtgccccagccctacgcgctgaagcacgcccagcttggaagcaatgcgggaggccttggcccctttttccgctctgaagtattccagcgcggccgccaccgtcatgccgagcacgtccgcaatgttcctgccgtcgcggtacacgctcagcacttcacttccgtaccgggagccgtggcacagcgggcactgcacgaagatatctgaaagaaattgcatttccaccttttcactccccatgcccatgcagcgcggacagcggccgtcgccgctgttgaaggagaagaaaccgggcttcatgccgcgcgcacgggccgtttccgtctccgagaagagggaacgtatttcttcaaagaccccggcataaacggcaggagtggagcgcggggtccggacgatggggctctggtccaccatcaccacttcatccagttgttcccagcccttgatggatttgacatgggcgggttcatcctcgcatacggcccctttttccaccagagcgttcaggtacagcacgtcgtgcgccagggtgctttttccagacccgctgacgccggtcaggcaggtgaagacgcccagaggcactttcacgtccagcttgtgcaggttgtggcgcgtggcgccggatacggtcagaaattgacgcggcttgcgcctctttttaggcaccgcgatgcgccgcctgccggaaaggaacgcccccgtcagggagtccgcaacttccccaatccgggcaggttctccggaataaaccagttttcccccctcccggccagagccgggccccatgtccaccaggctgtccgcggcacgcatcaccgtttcctcatgctccactaccaccagcgtattcccgcgctttttaagccggttcatggcggaaatcaaacgggaagtgtcgcgggggtggagccctacggtgggttcatccagcacaaacagagtatccgtcagggaagcgcccaggcaggtcgtcaagctcacgcgttcaatctccccgccggaaagggagcgcgtgggacggtcggacgtcaagtagccgagacccacttcattcagatattccaggcggcttctgagttccgccacggcatgcttcaagccggggtcttcatccgcgcgcggcgtgacgtattgatccacccaggccaggagttcgtccatgggcatcccggagagttccggcatgcttctgccgcccaccttgaattgcagggcttccggcctcaggcgcaagccatggcaggaggggcattcctgataggtgcggaaacggctcaggtacacccgcacatgcattttatgcgtgcggctttccaggtacctgaaaaagcccgcaatgccgtaccacaggccttgttcatacatttcatccggatcctctccgtccccgtacagcagccagtcccgttcccactgtttcaaatccttccacggtacatccagacgaactttgcgggcatttttgcgccagccgcgcatcaggtccttcttgcattcggaaaacaccttgctttccccttcaaaaatatggatggccccgtcattgacgctgagctccggcttgatgcaccggttgtagtcaatggtgatcacgcggccatagccgcggcactccgggcatgcccccaggggggaattgaaggaaaacaatccgggccgcggctccatcagcggatgccagtccccgcggaatttcatggcgggcagccagatgccgtccacgcggggaatcacatgggccacgccgccacccaggcgcatggccgtttccagcgcttccagcctgcgctcccgctggtcttccgccagcctcacgcggtcttgaatcaccagcaaaggagccccgtcttccagggtccattcctcgtcctccagccggagggcctctccatgcgcaaaggcgcgcaaatacccctgcgccaccaggttccttttcagcgtgggcaggtccacggattcgggccgcgccacttccaggcaaaccatcacctccgttccggaaggaaattcctcatgcagcttttcatcaatggagccgggtgtttccggcttgatttcccgtccggtttccggatatatccccacggccagacgggcgaaaacgaatttccagtaatcgttcagccctgtcatggttcccaccgtggagcgggacgtcctgacggagttgcgctgatgcagggcgatggccggaagaatgttctccacggcatccacgtccggcttgtccatacggtccatgaactggcgcacgtacggggaaaaggtttccatataacgcctctgcccttccgcatacagcgtgtgcatggccagactcgttttccccgatccggaaggtcccgtcaccactgtcagccgccccaggggaatgtccacatccacattctgcaaattatgctcacgggcgccgcggatgcggatgcgcccatcctcacaatgactcatagggtaattatatcatcaatttggaatcattccaagagaagtacctgtcatgaaccatgggccatcacacggttccacaacaaaaccggccaaaaaaaagtttacgtttatcctctttcccaactgatcgtctgcctctttccatgtatgacgcagccggaatgcaatggcatgccgcctcccgtttcatgcctagtgctcaagcgccggcttacatgctcatgcacgggcattcttcaattaatgcaggcaaaatttcctcctccggacaggaacggaagtcttccggaaccggaagtatcatggccggaggaccgccttccggaatctccatggaaggcagccgcacgggcaacatttttccggggcgcctgttccatgaataagaccggccatgatcgttcccatcaatccggatgagcacggcccttccggcacgaatcatctggctgtcctgtttgatctccacgtctatcaatgctcctttcaacgcggagcatcgaatctccaaggagacggaagaaaaccttttccggctcgtaaccgcgtacatgaatggggaaggaagagaactctttcccctttcttccaaaggataacaataataggtgacggattcgatatccgaaatccactttccatgaacatattgttcccggtccggcctgagccagggaaacaggtattccacggaatcatccagaaacgcagttttcctgttcctcaacgaaagcctcatccatttgaaaaacagctgttcatcatcacaataacggcgcaagagccaataggctcccagaacggccatgcatcggttgatgaggacggcgttttccccgttccctccatcgtccagccatgtttccttcatcgcgccggaagcgttgcaaatcacatggaaacgcaaagaacgctgcggatctaccctatccagcatatcatccagaatatccttttgccgcgcctccacgatgcactccgccagtgagaaaaacttccccccgttctccaacccgtgaaccatgctggaaaatccggcattttccagccgcaccatgcccgccttcggcaggtaagaagcgtcatgttccatcaccaggcgcgttccccgaatttcatcgggcatcctctccatcaggatgcggtacgctgaaaagccgacggcgcaaacggccagcaccgcacatcccatccccaaaagaggcttcattccgccttcataccacaaacaagcgcctccacacaggaatttccgttaacattcagataacaaaaacgtctctgaacggaacctccctccattactatttatgtttctcccaccctcccaaatttattccgcacagggtaatatccacggaatccgttccctcgggccatgggacaacaagcctgtaaccgtccgcataaggcaccttccgggaagctccgggagtggaatgagtatacagagcaatgcgcatttcattccccttcatggaaacttccgcatacaaatccccgtggtaatgggaatcaagttcaaaatgcatgaaaaggttgccgtcctcatcaatcccctcggacagcaaattcacttcctgctgttttacggcgccgttttcctggcagccggccatcatgcaaacagccggcagaaaaagggccagcccggcggaatggaatactccgtacatgctcattctctcctttcccctatacactcctacagggaaaagggagaggcaaggaaaaacggaaggaagacagaatgatgccgcccaaatccaacctattacgtcatcatcaaagcaaatggagggccgtgcttgcaattcttccggcagccgctagtatttttcgattcttagaccgctgaaagcgactctacctcgtcaattttcaacaagacaaagatgattaagtggattctaaccaagattgtcggtaccaaaaaccagcgtgaagtgcgccgtctgcgccccattgtggaacaaatcgtctccattgaagaatcatggaacggcaagggtcaggatttcctgcttgaaaaaacgaaggaatggcagggctatcttcaccgcttcctccccatggagcttccccccgtgcgcattgtggaagccgctcccagggaagagctggaggaaatagccgccaagctgaacgcacgctttgaatccctgaaagacgaatttgccgccctccccacggtggaagccactcccgcctccattgaagaggggaaggccgcctggaataacatcaccccccagtttgacaagctgcgcgaacgctacctgaaccagatcctgccggaagcctttgccgccgtcaaacacggcgcccggctgctctgcggggaagaacgcgatatctgcggacaaagacaactgtgggacatggtccactttgacgtgcagctgctgggcggcatcgccctgcaccgcggctacattgcggaaatggccacgggggaaggcaaaacgcttgtcgccacccttcccgtatacctgaacgcgctgaccggcatgggcgtgcacgtggtgaccgtgaacgactacctggcgcgccgcgactccgaatggatggggatgctcttccagttcctggggctgacggtcggctgcatccagagcatgatgccctcccagcttcgccgggagcaatacgcctgcgacatcacttacggcaccaacgccgaattcggcttcgactacctgcgcgacaacggcatggcgacctccaaatccgagcaggtgcagcgcgggcactacttctccattgtggacgaagtggactccatccttatcgacgaagcccgtacgcctctcatcatttccggtcccgcggtcgtcacccgggaacagcagtacgataccctgcgccccgccattgaacgcgtggtgaaagcgcagacggacctttgcaacgagctcatgtcgcaggccctgaaagcccaggaagaaggccgcacggaagaagtgggccgctgcctgttcaaggtgaagacaggccagccccgccaccgcgccttcctgcgcgccatgcaggatcccgagctgcgccgcatcgtggaaaaatatgaactgaccctttaccaggatacgcgcaaaaaggaactctacaagctgaaggaggaaatgttcttcaccgtggatgaaaagacccacgacgccgacctgatggaaaaaggccgtgaagtcatctcccccggccacccggaggacttcgtgctgccggacctgggaaccgcctttgcggaaatggatgaagacccccgcatgacggaaaaggacaagctgcgccgcaagaatgaactgaccaagcagcttgatgaaacgggagcacgcctgcacaccacctcccagttgctgaaagcctactgcatttacgaaaaagacgtggaatacgtcgtcaaggaaggcaaggtcatcatcattgaccagaacacgggccgcgaaatgccggggcgccgctggagcgacggactgcaccaggccgtggaagccaaggaaggcgtggaagtggagcgtgaaaaccagacctacgcgaccatcactatccagaactacttccgcctgtacaaaaaactggcgggcatgaccggcacggcggaaacggaagccgcggaattccatgacatttacaagctggacgtcctccccatcccgaccaaccgcccctgcatccgcaaggaccagaacgacctcatcttcaaatcccgccgtgaaaaattcaacgcggtgattaacaaaattcaggaactccatgacaaaggccagcccatcctgatcggcacggccagcgtggacgcctctgaaacgctctcccgcatgctcaaaagggccaaaatcccccatgaagtgctgaatgccaaaaaccaccagcgcgaagcggaaatcgtggcgctggccggcaagcgcggagccgtcaccgtctccaccaacatggcgggccgcggtacggacatcaagcttggcgaaggcgtggccgacctcggcggcctcttcgtcctgggcacggaacgccatgaatcccgccgcattgaccgccagctgcgcggccgctgctcccgccagggagaccccggcgcctcccagttcttcatctcctttgaagacgacctgatgcgcaacttcggcgcggcggaacgcatgacgaagatgatggaacgcctgggtgtggctgacggcgaagccctggaacacagcttcctgaacaaatccgtggaatccgcccaaaaacgcgtggaacagcgcaactacatgtggcgcaagcacgtgctggactatgacgacgtcatgaacaagcagcgtgaaatcgtttacggctaccggaatgaagtgctttctacggaaaacccgcgggaaatgatttacgacatcctggaagaagtaatcgccacccgcgcccatgaattcctggatccggactcggaaggcctgacccatccggacgaactgctcgcctggatgaactcctccttcccgctgggactgacggcggacgccgccaagctggaagaacgccagatggatgacaccatcgccttcctcattgacaaggtcaaggccacttatgaagacaaggcttcccgcgaacgtccggaatacctggaccacatggaacgccagatcatcctgggggctattgacaaaatgtggcaggagcacctgtacaacatggactctctgcgggaaggcgttcgcctccgcgcccagggccagaaggatcccctggtggaatacaagtctgaagcctacgacctgttcgttaccctgatggaaagcatcaagggtgaagctatcggcaacctcttcaagagcaccaccaacctggatgcgtttgaagacttcctggccagtctgccccagtttgattcttccgatgaaaatcaggaagacggcgccaacctgccggaaataggttttgacggcatgcccagcgacctgctctccgccctgcgggaacaagtctcccgtgcacgggaacaccagtccgcacaacagccggaacaggaagaagctccagccgtcatttccgacgccaccaccatcggtgaaggttaccagcccgctgtggcggaacccaagctggtcatgcccaggcgcaaggtcagcgtcgtgctccgcaaggagggagccgcccaggcgccggcggaaacgcctgccgccggtgaggaagaagaaatcgccgtcactcttgactcccaggacttcgcggaaaccatggacaaccgggattccgccgatacccgcacgttctaaaacattacgcatcacttacaggacggaggaaacgggtacagccgttccctccgtcttcaagcttccgggccgcccttgaccacgctccctcccaacaaatccaccaacgtccgttccgtgctggagtacgtcccgtacttcagggacaaaatctttgccgtgcatgtggaacgccccctggtggattccgaagagctggtggacgcattgctggacctggacgctcttcaggaaataggcgtcaggcccgtgctgatagtggaaggaacggacgcctccgcgctgtacgaacacacgcgcgtttgtgaaatgcgctccgccctggtggaagcgccgttgaaaggcggtcagcttgtccgggaaagagtccgggaaatcctggggaggcatcagatccccgtggtggcctccggccgttccggctcctttgacccggaatccgtccgtatggcattcagcctgggagcctccaaatacatcgccctgctcaacgaccataaggttccctcccgtgacggacgccccattgccgccattctggaatcggaagtggcgggcctggaaggagaagtaacccaccgggaactactggaccaggcggctgaggcctgccggacgggaatcccccgggtacacctgctggacggcaaaatgcgaggcgtactggtggaggaactcttctcggaagaaggcgtaggcaccatggtccacacggactcctaccgggaaatacgccccttgaaggaggaggacattccggagctcctctccatgatcgcccgctccgtagtggactccaagctggtcaaccggaactatgaggacatcgccgccagaatggatgactactacgtgctgactctggacgacagcatcgtgggctgcgttgccgtctatccctacccgaagcaccgcagcgcggaactgggctgcctgtacatcaagcaccgccatgaaggccgcggctatggccgcgccctgtgtgaattcgccaaaagaaaagcggaggaaatgggcatggaatttatcttcgccctctctcaaagcgccgtccactacttccgggaccgcatgcactacgcggaattctcccgtgactgcctccctccggaacgcctgcgcgccctggaactcagcggccgcaaatccggggtttttggactgagacttaaataaaaacgcgctttacctgtttattcaacttcagtagcttcgccattctcgcgtctattgactggaattgaggaaatctcttattttctgacggttcttctttaccgtttgcccccatgaagaccattccccaaataggagcgaatacagggcaggccatctaggtattccttcaactttccaggttgacgttcattgcaactcacgagtcattattcattgagatttttatgaaagtttttataactagtctcatataaaaaatcttacgcctctcttatagattttcattgaataattagcgcagacaactagttagttttaacttaaataacaattatcaaatatatgcgacacatataccggggggaaatcggggagatcaagtggcgcaatgctcgcatgtcttgtgcctatgccctgatggccatgcggaccaaggcgggtatttctcggaagatgatggctgcggctcttggatattcttctcggtgtattttcgtccatcgaaatggcaaacaacgaaaagatccatatgcctgccctcctgaaatacgtggaggtgacgggattgcctttcaaggtgtcaaccgttccgaagaagaggaaaccaggaacttccagaaaaaaatgacagtttgaggaacaggttttcttgcaatagcccaaaaacggaacgttttttcgtggaaaggcgaatgctatttttccaattgcgaacacagtggatttgtctttgtggggtgggttatataatatttgccgaggacagtgaggagggctggtagcgcaggagagggatggcactgggatggacttttgtcctaggctttacaggttttcgcaacacgctcttgcgagatttccttcccttcggtacggaagacacggcaataaccctaccgtcttccaactgaaccttgaaggggaagcccgtcacctccacatacttcagaacggcggccatgctcatcttgtcattggtcgcgctttcaatcgcggaaatgcgcggctgggaacaatcgagtgccgcagccatcatattctgcgaaattcctgccttgacgcgcatatgggcaagagccgaggaaacggtggaagcggcagcgatccgtttggcttcctccatgatctcgggcgatacacagtctctcaggtcatcttcgaccgttgcataacgcttgttctttgacagatcgatcggaacgtattctttattttccatggttacagaagaggttgaattaaaattgtgagacataatccttgcagtatttattatccttggactgtctttgtttgtctccggcacaaatcagatgcaactcgtaagcttgaacataacagtaaaaacatgtaggcaagtttgagcagcggatgcgagcggttgctgtgcgatggcgtggcaacccgacgtattcccggtgaacgtaggaatactccaccattcgcatgggattgccgtaatcttccagatgagcccggtattcgtccaggttgcgaatcatttgcgcggtctcccgaggataacgtttacccatccacttcatatcgcgtacaaattgatcactcggaataaccttccactcgctcatgtcgtcaacataatctgcagatgatgttttatcaggcaatcctcacaaaatttcaacatcgttcctcgcaaatcatccctcgtccctcaaaaaagctcctcctctcccctaccagcccccgcagcatattaacctgtctctcgaaaatcggttcctctaccaccgcattcattcagtcgataataacaaagtgctagtaagtgatgattatcattgacttgtctattattgtatttttaactaaggaaaactatgaaaatactacttctttttgatgttgattttgaaatcaataaaaacagaatttgcgactttcttaataataaaactacgcatcttaaatttgttaatggcggcgatataaacatagattctgatataatatcaaaaccggattcctttatatccattttaaataaaattaataaaaaaattcatgaatttgataaaattttttgttttacagaaaaacaatatatagataattattttttccatgaacataaaaaattgtccattttttctttttggggatggatttatttaacggacttatcgaagaacaatggcttattatattttattgttgattatttggcattatatattgatgatacagcttttagacataaaatcacaacaggttgcatatatgattttttgcaaaataagacaggaattgatgatggaatgaggcaagccaggatttgcccaacttgtctagaacgaatttctaataatttatcttcgcctgaacaaattaatattttggaggatttaaaaattctaatgaattttctttctgattcttcaaagtggaatcaagatatattggacctcgtaattccacaacatcaaagtataaagaaaaggaaatctaaaaaatctggagagataaatgttgtgatagcttcacctagtgatgcttggttagaacggaagaatttattggaaaaattagaaattcaatttagacgtggacatcatgaatcatattgttgtaaacgtttaatcgtacatggttgggaagatttagcatctcaatcagggtattctcaagatattataaatcgtcaaataatttgcaacgttgattttgttgtcgcaatattcaaatataaactgggaactccaacaattgatattgcgacaaaccaagaacgttccgtttcaggtacagcggaggagttattaacaagtttgaataattcgatggccgacaagcctctgggtatggcttatttctattcaaaagctccttccgtttctgttgatttagatgatcttgaaataataaaaaatgactgggataatttgcagaaattcaaaaaagatatacaaaacaaaatactatataagccgtatactgaaactggtgatttattgcagattataatttccgatttggaaaaaaatataattgattatttcgaatagatttcaagttaattagtgttagttcaattcgatcgtttttagtattctctatgaggggaagacatgggggagtcaaagatatgcaccattccgaattgagaacaacaaacacaggtatgcattttcataaatttgtatgtcaggcttgatttctcgccgtacttcttaccacaactcctccttccacccgcgccccttcgcctattgtgtgtattgtatcatcacgcattgtaagttaaaatgtctatcttatttagagtttctttcagtacatttaactgatcttcatcaaggcacggatacacttgggacaaagagcgacaagatcacgcttctccatctcaatggggtcttcactgcatgccaaggaacaatcatctcggaaaacttctccatcgcctccttgcgttgatcgtccgaaggtcggatatgcagctggtgagacatcccggaatcatgccccacaatctcgcgggcaagagcatgatccgcccctgccgcatgcagaaccgtggtggctattgcccgcagtgaatgaaacgtattcggacaaaataggctgcacatactcatccacccacttcaaggtaaaatatgcttttccaggagagcgatgattgggatacgcattttcaagaatggctctctcggactctggtattgatcccgccaatacaaccgcctcatcagcctgctcgaattaagtaatttcacctgtccattgcttccaaaaatgatttcagtgtcttgcattctgtcttgcattttcaccaaaaaaaaccgcaagtgctgataatcaagcacttgcggttataaaaaatggtagcagggaggtgatttgaacacccgaccaaaggcttatgagtcctctgctctaccactgagctaccctgccgttaagtggttggtgctggaaagcggggagatatttagcccggattggaaagaatgtccagatttttttatgggtcaggagcattttatcacgacagcccgcttctccatccagaaaaatcattgacgatgaatcgttcttttcctccaaccgtttcacacagcctgccgcccaggccgtttcctgcgtccggacacttgcggcgcagagcgtccttattcctccagtcccacgccatttacagagcgggacaggaaatagaggcccatgaagattttcgggtctaccacttttccctgccctgtctggtccatcagccagccatgcaccagcggaagaggaatgcggtgcacggtgatgttttcatgagccaccccgccgccttccgatatttggtgtagcccttccgccaggtagaaggataccatttccgtggtcaatccgggggaggaaggccccgtgaacaggtacgtccaggcatccgcccggtatcccgtttcttcttccagttcacgccgggcggattgcaatgtgctttcctccccttcatctccggagatgcccgcaggcagtccgatggtgagggcatgcaggggaacccggtattcctccaccagcagcagttcgccgtcctccgtcacggccacgatcatgacggctccattggcattgacccggcgcacgtattcccaccttccttctttcaagagctccaaaaattttccccggcagagggaataatatgtttccccggtttgttccatctgttccatgatgcagccacgttaggtttcccggcgcctcttgtcaaccatcccggctgccccctttcggaacctctccgggaccttctggtccggtgcctgtaagtgcttgatttacggcggcgtaattgtttccttttcgtcacacaccccaataacaaagtagtaattcactgataataaaataattatagtgtcattcaaagaatatactcaggaggactaaattattgaaggaagcaagactaaaatattttttggtgtggaacccccgtggaacgtagagccgcggaacgatgactcacgctgcttcaaaaagatattttttcctcaggcgcaaatcagtactttggcgcttccgtcgaccggggtgtcgagctgaaagcggatgagttcgccttctccatcccgatggacgccacgagctgtcacggctgcggatgaacccattccggttccatccgcgggcggcctcgtagcgagacggaaggcctcacagccatttataaccagcaacatcttttattttcacaacaatgacgccaccatcagaattgtcagccacctggtccaggatcacgggagccctgcaaacaatcatgtctccggaggtgtatggattgtggtttcccaagttttccctcctggaggattccggaaagacgctgacgctggtgtgtgacgatcccatggccgccctctgggtggagaacagctatacgccggagctgaagcaggccgccatgctggccctgggcacggagcgccaggtgaagttcatctgcgcggacgaggtggcatccctgccggccgccgaaggccaaccacaaaaggcttcctcccgctccaaaacgccccaggtgcaggattcccctgccgctccggccaaaaaacagcgcagccagggaacccgggcatgcctgaatgatttgtacacgttcgattcgttcgtggtttatgaagacagccgctttgcctatcaggcagggctgtccatcgcccagtcggaacgggccctgttcaatccccttttcctgtacgggaagtccggcgtggggaaaacgcacctgctccaggccatcggccatgaggtgcttcaccaggattcctccgcgaatgtggtgtacgtcacgggcgaacagttcgccaatgagtttattgacgcgtcccgcacccagaacgggcagagcttcgccaagctgcgccgcaagtaccgcaaggcggacgtcctgctggtggacgacgtgcagtttatttccggcaaggagaagacggtggaagagttcctgcatacgtttgacgagctattccacgcccacaaaacgatcgtgatttgcgccgatgccgccgcatgcgatatttccaacctggattcccgtctggcggcacgcctggagtccggccttacggtggagttgaatcttccggatgatgacgcccggctggaaatcctgcgcagcaagcgcgaccgggccggcatgaacgtgtctgacgagattctggagttcctcgccagccgcatccagaagagcgtgcgccgcctggaaggggccctgctccgcgtagccacctttacctccctgtccggggacatgccggacatcgccaagatcgagcagcttttgcgcgatatcctgcgggaagaaaccagccgcatcctgaccgtggattccatccagaagcgcgtggcggatttttacgagctcaaggtgagcgacctgaccggcaagcgccgccccaacagcatcgcctttccccggcagattgccatgtacctgagccgccgcctgacggaatgctccctgaaggatatcggccaggccttcggaggccgggaccacggcaccgtgatccatgccaacaagctggttgcctcccgcatggaggaggacgtgcgcgtgcgggatatcgtcctgcggctggaggaggatttgaaggattgattttccttcccggcagcccttccccagtaatgttggaacagccgctgttccttttcagcatgtggtgcttttcaagcggcggcggcgtctccgcggcacaggggagaataagcttgagacgggagcggtttggattagaatcaccctgttcccattgattccatgatccacgccgaccagctttccaaagagtttggccgctttcaagcggtaaagaatgcctccttccagattgaaaagggggaaatcgtagggttcctggggccgaacggcgcaggcaagaccacgactttacgcatgctgaccggctacctgccccccacttccgggaccgccacgattgcgggattcgacatcgttaaaaatcctctggaggcgcgcaagcacctgggctacctgccggagcacgtgcctctttacgacgaccagcgcgtgacggagtacctgaagttccgcgccaggcttaaaggcatttcttccaagcagatatggcccgccgtctccaaggtcgtggagcaatgcggcctggaccccgtgcgccgcaagatgatccgcaccctttccaaaggctaccgacagcgcgtgggcctggcggacgccctgctgggtgaaccggacctgctgattctggacgaacccaccaacggcctggaccctaaccagatacgccagatacgcgagctgatcaaggggctggcggccaaccacaccattattctttccacccatattctgagtgaggtggagatgatctgcaacaaggtcatcatcattgaccaggggaccatcaaggcagcggataccccctctaacctgacggccaacctccgcgccgccggcaagattacgctggagttccgcggggatctggagctgattacgcagaagctggaaagcctggaacacgtgaagaaggtcatccatgaaggcacggacgccgatggctggcatacgctgaccgtacgcgcggaggccggaacggatacccgtgagaaggccgcgcgcctccttgcggaacagggctgccccctgcgccatatttaccgccacacccccaccctggaagaggtgttcgtggaaatgacccgtaaagattaaccgcccgtttcttctccctctctatccaccaccccgcattttccttttctccccatgtctccggtacttaccattttcagaaaagaactcagaagctacgtgatgaccccgtacggatgggtcatcctggccttcgtcatggccctgcagagcgtttccctgtccggcacgctgaaggcgttccagctggccccgcagaaggaaggcattttgttcttcatcctgcattcccccatgttctggttttatttcctgttcattttcccgctgcttaccatgcgttccctggcggaggaagagaagacaggaacgctggaatccctgctgaccacgcccatcaagacatggcaggtagtcctgggcaaatatttctccgcatacgccttttacatcatcctgtggctgcccatgctgctgtacccccttctggcggactggtccaacctgatcgtgcagtggatttacgggtatgatgcgggcatggtcctcccctaccgcctggcggactgggccggggcgtacgccatcctgctgctggtcggcgcctggttcacggccatcggcattttcgcctcgtccctgacgggcagccagatcatttccggcatcatcaccatcggcctgctggtgctgattttcttcatggggcttattcccgtggtatggggagaattccccgcagcggggattttccactacatgtcctgctcggaacatctggaccgcttttccgccgggctggttgatacgcgccctgtcgtcttttacctgaccatgacggtcttgacgctggccgtcaccatccgcatcattgaccaccgccgctggaagcactgatctaccccgccttttccctttcaccccttttcatttttatctatgagcgaagcaccagacaaccccgccgcggccacggaatcccccctccctcccgcccgcaaggtcagacgcccctggatgacctggatcaagcttttcctgctgttcctcatcgtcgtatgcctgaattacgtgggctgccacgaatattaccgccgggacctgacggaagaccagcgttatgagatttcccagcagagcatcaacatgctgaaatctccggaaatccagaaccgcaagacgcccgtcaagatcacgttcgccttcctgcgcaccacgcagaattacacccgcatgcgctccctgcttgaggagtacgaacgttattccaacgggaaggtgaaggtggagtacgtggaccccctccgccagccgaacaaggcccgggagattgcgaacatttacgggattgaattcaagaagaacctggtcatcatcgatgcccgggaagacacggaaaaagcgctcaagacgtttgaaggcacccaggtggacgccgcccacgtgcgcatcctgcccggagacgccttcgtggtgtacgcccccagcccggacggcaagagcatgaaggcggtggccctccagattgaagacatgatgaccgccggcatttacggggcggccaatggagaaccccgcaagatgtatattgcggcggacaagagcaatttcaacgaggcgctgagcaacagccaggaggaaagcattttcaccacgctggggaaaatctgccgttccgtcaaccttcagctcgttcccatccgcatgagcggcttgaaggagattccggaagacgctgcggggttcatgatcatcggctccaagtacgacctgtccccgcaggaggcggaagtgctccagcggtactgggcgcgcccgaacgccgccatcctggtcatgctagaaccccagcaggatacgcccaaacagctttatcggttcctccgtgaacagggcctgcgcccacagaatgaccgcgtgatgctccgcaacaggggcaaccgctccgttttcgagattaacgccattttcgcgccctccctgaactgcacgcgcagattctggaattccagcaccgggctggaaggggagagcatttccctcatcctggattccgacaacgcggccatggagcagaagcgcatcacgccataccccctgctggtgactacggaggattattacggggaaaccaagtacaaccagttcccggcccagtttgacgcgcgggaagacaacccggggcccctgatgatcggcgcggccctcatccgcgggaacgccggggacgtaaaccagaacaagaccaccggacgcctggtgctgctggggaatacggacctgctccagcccaggcaaatcaagccggaacagcgggacttcatgcgcacgctggttggctggatgacggaccgtgaagaactgcgcggcctcggctcccgccatgacctgaccgtgaagctgaacctggaccgcaacgccctgggcattctggaactcctgacaaacatcggccttcccctgctggcgcttctgattgccctgattatctggaacacgcgccgccattaactccaccacgcccatcaccggaagcacatgcgcacattccgcttcatccttcttatcctcgtcaccctcgccgccatcggcgcggcggtgctcctgaccattgacggcaacctgtcccgcatcatcgggcgcaccgccttcagttccggagaacggcttttcccctatacccgggaggagatgaacgaggtttcctggatgcgcatcaattgcatgggggacgttgcggagttccgccgcaagcccaacggcgtctggtggtgcgagaagccgtgggacgaccgcatggacccgcgcgcggcggcggccatcctccagtacacatattccaccagcatcgtggacgcgctgcccctgcacaagattgattccgcctccctgaaggagttcggcgtgaagacgacgcccgtcaccatcaccctgaaggagatgagcgacgacggcaagcgctcctccaccgtggcccgctacacgctggggtccctcgctccctggctggtggacgatccggagaacaagaccacggacgataccacctacatgcagacggatttctacgggcgggacacccgcatcctggtgggcaccggcaatatcctgcccctgttcaagtccggcatccgccagctccgggaccaccgccccctgctcctgcatccggccatgcccgcctccattgaaatcaacaaccgaggccagcgcatcgccctggagcgcaagactcccggcagcccctggaaaatcacgtaccccctttccctggatacggacccggccatgatggacgtgctgctgggcacgctccagaagctgaccgccgtgcgcgtgtataatccggaggaaaccagcgtgccggacatgacggacgaccagatcacctccgtctccatcaggaatttcacaggccgccccacggaggacggcaaatccctgcaaacggaggaacagcccgttacgctccgcatttaccccccttccgacaacggaagcctgtccgaactggtgaaggccaccgtttctgaccgcaaggccgtctttgaactggcgcagacgacggagaccaacaaggaggtgcccggcgtgcgcaacattccgctggacctgggccttctgcgctccaagcagttgacggacatcggggattacaagatcaccgggctttccatccgcaagagttttcaggattaccccaccatcgcccgctttattcagggtgatgagaaaaagggcatcaagcccacctggctgtacacggcggaaggctcccgctaccaggaggccaatccggagcatctcgtttccctgctgaaaaccgtcaagctggggaaggtggccggcttcgcctctgacaaggctacggacctttccgtgtacgggctggacaatcccaggatgacgctcaccatgtccctgctgcccaagcccggtgaagaaccgcgcccccccgtgacggtgtttttctccaagggaacggacggttcctggtacgcccgccaggccggcaagcccaccgtcgtcatgctggacagcgcctacatgaaggacctgctgacggacgccctggcctggaagaaaaagatgcttttctctttcagcaggttcgacctcaaggaaatgcatctggaacgcatcggctccggcggtcccctgatcctgaaattcgaccgtctggacgattcctggaccgctgccaaggatgggaaggatgaaaccctgaacatcaatccgaaccgcgccaaccgctatctggacgagctggaaaagatggaggtgagcacctggctgccctatacggacgccacggcgcacgaggccctgaagaaccccgttttccgcctgaaactcatcctccaggtttacaaggaggcggcccccgtgcagtcccaggccggccccagcgacatcaccttcgccccggaaccggagacggaggaaaaagtcatcacgctggaaatcgctccggcaggagaggccggatacagcaggttttattacggcagggtgaatacatcccccaactactttatcctgaacatggacgccgtgcgcctgctcggcgccagcctctcggaagacaactgaccattcctcccgcatgagtattgatctgcaaaccgttaccgcttttctggacggaatcctttccgtggattccattccggacgcatcccgcgccctgaacggccttcaactggaaaacggaggagccgtttccagggtagccgccgccgtggacggctcggagaaggctatccatgcggcattggagacgggggcggacctgctcctccttcatcacggcattttctggcagaccatgcagcccattaccggcattgcataccggaagctgaaagccgccatggacgggaacctggcgatttacgccgcccaccttcctctggacgtccaccccgtgtacggaaataacgccctgctggcgaaggcctgcggaatccggccatgttccaatgaaggactggactaccacggcgtttccctgggtacgcacggggaattccccggcacgtgccgggagctggcgcagcggctggaaaccgtcctcggagcgtccattcaaactttctgggcggactccccggctgccccggctggcgacgtcttcgtctgctccggaggagccggggacgaccttgtccaggccgcagccctcggctgccgtacctacgtgaccggggagggttcccactggaacatccccatggcccatgaactgggcgtcaatctggtcttcggcggccactacttcacggagacgttcggcgtaaaagccctggggcatctgctcaaggacgtttacggtctggactatgccttcatcgacctgccgccctccgcctacagccattgaccaaacgccacggatcatgaatctgaccacggacgatgccgacgggaaaatccgcctggaccaataccttgccgcccaccttccggagctttcccgttccagaatccagagcctgatcaaaagcggggacgtattggtcaacggcactcccgccaagcctaaaaacccagtttcccgcggtgattccatcaccgtccgcattccggagccggaaccggcggaagcacggccgcaggacattcccctggacatcctgtatgaggatgaagacgtggtggtcatcaacaaggaaagcggcatggtcgtgcatcctgccgccggcaacccggacggcaccatcgtgaacgccctgctccaccattgcggggacctctccggcatcggcggcgtggaacgccccggcatcgtccaccgcctggacaaggatacgtcaggctgcctggtcattgccaagaacgacggagcacaccagtccctgacggcgcagttcgcggcccgcagcacggaaaaacggtacctggccgttgtccagggcattccctcccaaagctccggcacggttttcacccacattgggcgccatcccgtgaaccgcctgaaaatggcggtggtcaatccgggcaccgggaaagccgccattacggactacgacctgctgtgcgcagacccggccacggattcctccctggtcctgtgcacgctccacacgggcagaacccaccagatacgcgtgcacatgctccatctgggccatccgctcatcggggaccccatttacgccaaacccgcccggcagaaggcgaaacccggcaggctcatgctccacgcgtggcggctgggcttcgaccacccgcgcacgggaaagcgcatggagtttgaagcgcccatcccgccggaatatacgccgtggctccagctctttcccaacgggctttacggagccgttccggagccgcgcccggtgaggaaaaacggggagcagagctgaagcggccctgttttccgtatttcggaaacggcggagggagcgccaaaaggcaaaggaagcccctattttttgccttcctccggcttgcagaacttgcgccagtctttcagaagcgtggcgggatgccctgtgatgatgatcttgcccgtgccatccacaattcccagccgtggaatggagcctcccggcttgtaaccgggaataccgttccctttcttcggcttgacgatggggaatttcatccgttcctccttggcccatgccttggcggcctcctccgtcttgtcacaggaaaacagcaccagttccacatcatcggtctggcggatcttccggtaggtccgcaccacgtggggcatttcccggcagcaggggccgcaccaactggcggaatacaggaaaagataatatttggcttttgggttcggcctgtccttggttaaaaaatcggctttttccagagccttccccacggcggaaacggcagcctccccggccttgggagccggagtatccgcgctggcggaaaacattccggccacaccgcatccggcgagcatgagagcaacagagcacagtttgatggattttttcatagacccatcattatcaataaaaaaataacggtcaagcaagattattcgccggagcgtattctgaagaggaggaaaacaggcaggtaatgccggcttcagaaggccgggaaaaaagctgaacgaaggaacaggaatttgcatttgtttttcacctgccgggagcgggaaaagaaagaattcagcggcgcgccgcaccacggttcttcaggaagaaggccggaacctaacttggcggctggacagaaaacgcacaagagctaaaccgccgattttttggcggcccccattctcccggcaaaggctcaacaaccgcccccgcgtcccatcaacaaacagccaaccgggaacaagggcctcccggcccttgtaaaaaacagtccaacataaaaatattcccttatgccccctttttgggcggagcattcaaatccacggtcaccttcacgggaacatccatggccttgacgcccttgctggccaccaccgtagctttcattttagcgggcatgttctttacctggtacgtataagtgcgggaaggaacggaaccgaagctgaacgaacttttggacacgccgggtatctccagtttgccgccctccgcgtcagtcagcgttatttcctccacatggagcgtatcactgaatcccagttccacctcaccggaagccttgccgtggtcctttgcatccttcacggtgatttccatgccctccaccttgaatttggcgcccttccgcgcgtcaaactcctggcccggaaaagtcctgcttcctttggaaaccttcatgttgaccactccgtccagcttcaggggaaacacaggtttctgtttcagcctcagggaatgtttggcaaaggctccggaatccgcaatacgggtaaaaaaattgtcgaatttggcttttgtcctggcgccgcggccatccgtaacttcaagctgtgagtcctcaccgcccttaacgaatttacagcccttgggagcaacgaaacccagcaccacctccacggcatccttatttctgttaaacatgtcatccacgccggcaggatcagggaaggacagggagacctgggagacataaacgttcacggcctgtccgctggcgcaggctatctgggaaacggcgcccaggaaacatgccacggcagtcggcaacaatgtttttttcatcatattaaagagaggcaaacctaccctgcatcttccgtgcatgcaagaaaaatccgccatggagaagccccccctttaatcttgatttgcccccgcggaaccgctaccctgacgcggctttaaacacacagctttcacagagacatggagaacactcaacacggggattccgcctccccggccaatcccccccggcagcagaaaagcggaaacacggatgaacagaccatcgccctgacgaaggcgcgtctggccattgacgaggtggacgcccggattgtggagctgcttaagaaccgcgccgaatgggtgcatgaagtcggccgcattaaaaaggaggggaattcccccatcttcgttcccgaacgcgaaacggccctgctcagcaagctgaaccgcctgaacgcgggcgtgctgccggaggcctccctccaggccatttaccgtgaaatcatctcctgctccttcttcctggaaggggggcttaccattgcctacctgggccccaagggcacatggagccaccaggcggccctcaagcagttcggtaaaagctgcgaacttatcccgtgccagagcttcaaggacgtgtttgacatggtggaccgcgggaaggcccagtacggcgtggtgcccgtggaaaactcctcggaaggctccgtgaccgccgtgatggacctcttcgtcacctctcccctcaaaatctgcgcccagatcaatctgaacatccgcaacagcctgatggcggacatcccgcgggaacacatccgcatcctgtattcccatccgcaggttctcggccagacgcggaactggattctgcggcacttcccgaacgcggagctcgtggaaacctcctccaccacgaaggccagcatccttgccaaggagaacgcctccatgggcgcggcgtccctgggctgcccgctggccgcggaactgttcggcctgaacattctggaagaagacgcgcaggaccaggcctgcaacaccacccgttttgccgtcatcggccgccaggaaacgcagcccagcggcagggaccgcacatccctgctcatccgcatccagcacaagcccggcaccctggcggaagtcatcaactgcttccagcggcacaacaacaacctgatccgcattgaatcccgcccctccaaggtcatcaactgggagtacgtcttttacatagacgccgtaggccacattcaggaatcccccctacgggaaaccctcccggagctggaacagcactgctccatgctgaaaatcctgggcagttacgcggatacggacgtcatttgaccggcttaatctttctccccccgcttcataccaccctgaaaaaccatgaaaatcgctacgattgccgccctggccctcaccctggcacttccctctctggcccagcagtccgccactaaaatcgttacggagaacgggcagcccacgctggccctggatgaacagttcgcggcccggctgcgcagcggcaggacggaacaaaacgcccccgccacggttccctcggaattctcggcagccgcccccggacttcccctccccgcggacgccaaccacgccgctgtgaaggaaacggcggaagagcgcaaccgtcgcatggaatggtggagggacgccaaattcggcatgttcatccactacggcctgtattccgggctggccggggaatggaaaggcaagcccggcggttccgaatggattcagaaaaacgtggaagtggacacggattcctacgctgcggaagccctgcccctgttcaagcccaaggaagggctgacggaagaatgggcccggcttgcccgggacgcagggtgccaatacgtggtgctcaccagcaagcatcatgaaggcttcggcctgtttgacagcgcccagacggattacgactccaaaagcgccgtgaaccgggacattatccgcgaatacgtggactcctgccgcaagcgcggcttgaaggtaggcctttaccactccgtcatcgactggcaccacccgtcctatgacaacaccatctgcccggacctctgctatcccgcgggacaggcggaaatgcttaaaaggaaaaacatcccgcgggaccacgccgcctaccagaagtacctgcacgcccaggtccgggagctgatgacccgttacgctcccattgacatcatgtggtgggattattcccagggagccatggaaggggccaggggctggaaagcgccggaactgatggacatggtgcgctccatcaatcccggcgtcatcatgaacaaccgcctgtacgcctattccggcctgaaccgggaccaggccggcacgctggacctgcgctgcggggactacatcaccccggaacgcttcatcccccggcgcggctatcccggcgtggactgggaatcctgcatgacggtgagcgacaaatggggctacaaccggtatgacaccaacatcaagtctccggaaaccgtcattgaaaaactggtggaatgcgtcaccaagggaggcaacctcctgctgaacgtgaacccgatggcggacggaaccgttccggaaaaagtggccgccaccatgcgcggcgtgggccagtggctcaagatcaacggggaggccgtgtacggcacgcgggccttcacggaactggaccagcccgcctccatcaaccggcagggggacatcttcgtcttcctggttccgccgccggacaagggaccggcccagcctcccagcgaagggaccatgaaggaactgacggaaggcgcggaatacgcccgcatgcagccgctggattccaccggatacgaggacgaggaaggaacctccgtctccctccccgcaggctactccaaagcggtgctgctgggagacaacaccgccctgcccgtcgtcaacggaacggttctgttcaaggcgcacgaacactccaaaacgccctgttccgtcatcaaactgagcaaatagccctcttttccactcattttccttatggaggaagaccttttttccctggcggccggcaagcagccgtcacagcaggcaaaggatgaagcgggatcccaagccggagaaccgcaggaaagcgccgcccccgtccagcccggcaagacgaaggaagacgtgcgcaaccgcgtggactacctgcgttccgaactgcgccgccacaaccggctgtattacgaacaggcggaaccggagatctccgatgcggaatatgacgccctgttcctgaagcttgaaaaactggaaaaggcccatcccgaactggcggagccggattcacccacgcgccgtgtggggggggcgccgctccagggcttcaaccagatcaggcacgcagtgcccatgctgtccattgacgacattttcgagcagcgcgacgcccctgttccggacgaggaactggtggaattctacaacaagctggtcaaggcgctgaaaacggaaacggtgcccgtctccgtggaacccaagattgacggggtagccctctccatcatgtaccgcgacgggcggctcgcttatgcggccacgcgcggggacggagacgtgggggatgacgtgacggccaacgtccgcaccatccgcagcgtccccctcacccttcccgctggggcccctcccgtgctggaggtgcgcggagaggtcttcatgcccaatgaagcctttgccaaactaaatgaggaacgggacgcggaaggtctccccgccttcgccaacccgcgcaacgccaccgccggaaccctcaagcagctggacccccggcaggtggccgcccgtcccctggccttcctggcccacgggcttggcgcgtatgaagggccggaactcacgaatgtaaaggatttctgggacatgctccgccactgcggcattccctgcaatgatccggtgtattatacggacagcctggaatccacccgtcaggccgtgcgggacattgacaggctccgccacacgctcccctacggcacggacggcgccgtcattaaaatcagctccatggccacccgggaggccctgggagccacggcgcgcgccccccgctgggcggcggcgtacaaattccccccggaacagaaggaaaccgccctgctgaacatcatcgtgcaggtgggccgcaccggggtgctgacgcccgtggcggaactcaagcccgtgctgctgtccggctccacggtggcgcgagccacccttcacaaccaggatgaaatcgaccggaaggacgtccgcatcggagataccgtgctggtggaaaaggcgggggaaatcatccccgccgttctgaaagtgaacctttccaaacgtccggcggatgccaggccctacagcattctggaagccacggggggcctgtgccccgcgtgcggcaaccccatcatgaaggaggagggaaaagtggcctggcgctgcaccaacttcacctgtcctgcgcaggccgtgtcgggcatcacccacttctgctcccgctccgcgctggacgtggaaagcatcggctcttccgtggcggaagctttgagaagctccggcctggctgcctccgcgctggacctcttctccctgaagctggaacagctcgccaacctgaacctgggcacgccggaggaaccgcgccgctatggggaaaagaacgcccagaaagcgctggacgccctgcaaaacgcgcgcgagcttccgctggaacgctggctcatcgccttcggcattcccctggtaggggaagtagtcgccaaggcgctggcggacacgcacccggacctggagcatgtggcggactcctcctacctccgggacatcgtgcgcctggacgagctgatggaacaagccgccaaaaccaaccccaacacccgtgaaaacagaaaggcggtgaaggaaggcgcgctttccgcagaggcggtgcaggagcgccatcaggaactgacggatgaaatcgaccgcctgaccgccccctatctggaaacgggctacctgcgcaagaacacggccaagttcagctatggctccgaaatcggcgtggcggcggccaaatccctccagagctttttcacctccgcagcggggaaccatacgatggacgttctgcgcggcctgggcatcaatccccagtcccagtcctaccgggccaaccttctggaaatcccggcgggggccctgtccggcaagaccttcgtcatcaccggaacgctcagccaaccgcgggactactttgaacagctcattgccgcccacggggggaaagccaccggagccatttccaaatccacctcctacctcctggcaggcagcggcggcggctccaaacgggacaaggccctcaagctgggcgttcccgtcatctccgaggaagacttcaacaagctggtcggggaataggccgccatccctaccctactctgtttcccatcgacgctacagaaacccgttccctgcatcatgccgcaggcttccgcctgttccatcccgccggagctcaaggcaaaaacgcccaatgtgccccctccgtccaccccttctcccttccatggtccgtctgattttttccgtgtgccgcattccgggaatttaattcctgaatcctgcaaaaaagcttgctacggaccgtcatctgctccctaataaaccgcgtatgctgaacctgcctaacgctattaccctgacacggattgccctggtagtcgtcttcacggcagcagtcagcatcgcggaccagtattcctggggatacctggccgcactggtcaccttcatcctggcggcctgcacggactggctggacggctacctggcccgccgcctgaaccaggtcaccaccttcggcaagctcattgaccccctggcggacaagattgccgtttccgccgccttcatttacctgacgggcgtggggctatgccccgtctgggtcaccattctcatcatcagccgggaattcctggtcacgggcctgcgccagattgcccaggaccacggcgtcatcattcccgcgggcacgtccggcaaatggaaaaccgccttccagctggctttctgcatcgcctccctgctggccctgacctggacgcacacgccggaatacctgccctccttcctggaccagcttgcggcgctctgcctgtggcacggatccggagcttccaatttcctgtaccagttcactctgtggggctccatcatcctgaccgtgtattccggggccgtttactgcgtgggcgcgcgcaaattcttccagcactaagggttccccgccaggttcccggctgttcttccctccgcatgccggaaagaggaatgtacatccacagcttgaaaccgaacaggggaatcttctcccccgggtaccccggcgccctttcatcaccatcccatatgccgacagaaaaatggaaaacagcgataaaaaaggcagcccatgaaaggcagccttttcattattttctgaactccattcaggcagattatttcatgataagggttagtgccgtaacttgcttgttttatctcacgagctagccagaggcgatttgcagaagttttcccagctcaaatacggcaggctttctgccgcttccttctctcaccttccgcaccaacccggcttcgatgatctgattcaggagattgcgaacagtcatgtcttggcaggtgttttccttctccttcatttttttaataatttgaggcctcgtaaagatgggggtctcgaaaatgcaatccagaagcagatgagagtattcggaatgggtgatgttcctgaaagcatcttctagttcgttatgaagtttgttgatctctacggcgcggttgatgtttgccgtggcctgctccaccatcgcccgcaggaaaaaggaaagccattcgttccatttattttcttcatggacggcattcaagcatctgtaatattcgtcccggtgagcttccagataggcggacatgtaaaacatgggacggtgcaaaatgttcttggcataaagaaaaagaggaatcatgagccgtccgattcggccgttgccgtccagaaatggatgaatcatctcaaactgaacgtgcatcacggctgcccgaacaagagggtccagctgagctttctcctcaatgctccaatcattcaccatgtagtccaaccagttttccatcaaggcttccacgtgcaccggatcgggaggaatgtaggaggcctgttcgatcgggcagccgtgggaacctatccagttttgtacctctcggaaaaggccgggggactttgtgttgccgcgcacgccttccagcagaattctatggatttccttgaccaagccaaggctcaacggcctttctccgagactgcgggatgcaaatttcaaggctgaccgataatttttaatttcgtcaatgtcctcccttttgctttcgctgaatgatatgccagcgtcttgttcgtacacttcgtcaatggttgcctgcgtgccttcgattttggaagacagaactgcttcttgagtcatgaagggtgacaggagaatgtcaggattgaccaacgtccttactattccatcataacgagctacagctccgttggcttttcccaggatatcggcaaatgcgtttgcatcaattctttttagaacaggcagatattccggaagataaggtgtcttcatcacaactttgttgataatgaaagtaggattcaaagtcaacaaatgatttcgttgactttatattatcatcaaaactgtttatttacatcaaaaaggtatttcacagtcaacaaagtattttgatggtattttgttttcatcaacgaatagtaattccgttttacgcacggttcttaccggagggcagtccattccttttgccaggctcttgtgagaatttgcttggaggctccgtcagtttcccagccttccgagaaggtgcagagagggtcgaaaccaggagagcaaacatcttgcataggctccattgcccaggctatttcgccagttctcctctgctatagtttccataactatgcaacacactttcaaaggaaaatgggcacaggggccgcacactgccgaggttccgcaacgcgaatctgactctcctcaggaggcgtcccgccagacttctcaggaaaacaccggaaaacggaatcctgacgcaatagacgtttttatttctcttgacggatattctgcgccgtgcttatatcgtgctgttcccgccaaatggtgcttggttgttgatttttgatagtcatttgcggttggcggaatacgggcgtctccgtattgatcctttcagtatcgctcctgcgggcttctttttgttccgctattgtcgtgattccgtcagttcattgcagccgaggcgcattcacagacacatcaataaacatggtatcaaccacattcagggagcttggcttgtcggctcccattctccgccagctggagaaactggagtacaagacccccacccccatccaggcagcctgcatccccctgctgctgcagaacaaggacctgatgggactggcgcagaccggaaccggcaaaacggccgcgttcgccctgcccctcattcaacaattttcagaacatcccagaaagccgcttgcccgccaggtaagggcgctcatcctgagccccacccgggaactggccgcgcagattcatgacaacatctgcgcctatgccaaagggctgaacctgtccaccgccgtcatcttcggcggcgtggggtacgccccccagttcaagaagctggccggcggcctggatattctggtagccacgcccggcaggctgattgaccatctggaacgccagaccgtcaacctgggcggtgtggaaaccctgattctggacgaagcggaccacatgctggacatgggcttcgctccggccctgaaaaagatcgtcgccaaaatcccgaagaaacgccatacccagatgttctccgccaccatgccggacaacattctgcaactggcccagtccctgcttcaggaaccggaaacggtgatggtcacccccccggccgccacggcggacagggtggaacagtccctctgcatggttggctcccaggcggaaaaaaggccccttaccctggatctgctggaacagcaggaacagccgggccgcacgctcatcttcacccggaccaagcacggcgcgaaccgcctggcctccttcctgaccggaaaggaccacccggcctccgccatccacggcgacaagagccagggcacgcgtgaacgcatgctccgggaattccgttccggggaaacgcccattctcgtcgccacggacatcgccgcccgcggcattgacgtgaaagacgtgcagctcgtcatcaactacgatctgccggaagaaccggaagtctatgtgcaccgcatcggccgcacggcacgcgccggagccgccgggcaagccatcgccctctgttccccggatgaaatcaaaaaagccagggacgtgcacaagctgctggggcgcctccttcccgtccattcctccagcgccaccataccgtctgaattgcagacggttcccggcacgcacagggaaaggaaaaactccatgcaggaaaaccgttccgcctcccgcagggggccgcggaaaagttacggaaggcggaattccgccggaaggcagggaagccgtgcgggcgcatgattttaatcattcaaaaaaacttttgaacgaaatcaggggctgcacagtctcacttgctacaaacggttcaccggaccgttccagtcgggaagcttcaaccggagtttcaatcatgaaaatcatctcgtccatcatcaagacactgtgcgtgggtaccgtcggttccctcgcctgccaggccgccatgcaggcttacgcggatgacgttccctccacgtttgtggaaggcaactattccccggaagtagcccgctacgtgcagagcatcgcaggcgtggcgctggcctcaggcattcatgattatgacgaaaacgctaccagcagctaccaggttctggctcaggttctcaacagcggcaatgcaacggaattgccggacgacctgaaacgggccattgaaatgctgaccagctacgtccccgacccgaacgcgaccattcagccgattctgactaaaaaacagattgagaggatggagcagatggcggaccgtattgaaaacctgatggaggaaaaatacggagtggacctggaagactgcatgaatatcatgaaacgtgcattggccccgtccattcccgacatcctccgctcctgtgacatggaaggcacgcagctgccgaccaccaccgttttccgccccaggctgggcaaggcgctgaatgaagcttatgccaggcttgccgcgtcaaaacttcccgccgccggcacggctcagtaaccggaccacttcaaaacgaccgggaagatgatcccgattccacggcatgcggaccccgtcaaggttccctgaacagaagccgcaggaaacggaatgatcttccccgtcgccaggaaaggaaacaacagccagcgccggcgacaccacgcaacactctccggatgtcctccgatgcagggccgatccttcggaccgcggtgcagcgatacgctcaccccccttcactcccaagcaacggcatgcaacatcggcacaaccgggtgatgcacctgacaggccccgtccttcccgcactgcggcaggaatggggcctttttcatgcccgcctcccggaaggagcctgccttcccctcttttgacgcctccggcgcggagcacctctctcccgcaggagaatgcattttttgcaccatccgtgaaagaaagattctcaagtccgggtatgtatggcaaactaaggactcaaatccttccatataattaccatccatggataattcatcatcacgccgtcgtttccttcagaccctgggtctggctactggcgccctggctgccggttccttcgccaacgcccaggaagtagctcccctggctcccaaaaagatcatcgttccggacccgaacaacatcggtcccatgaccacgtggcccccgcgcaagcccggcgccatctacatgggcggcttcagggcccccaagctggacaaggtgcgcgtggccttcgtcggcgtaggtgaacgcggctccatgcacgtgggccagatggccgtcattgaaggcgcggaagtcgtcggcatctgcgacctgtacaaggactgggcggaacgcaacgcggcgctggtggaaaagaagacgggcaagcgccctcccattttcacgaacggcccggaagactacaagcgcatgatgaaggaagtcaagccggacgccgtcatcgtctgccccagctgggaatggcactgccgcgtcacctgcgacgtgatgaaaatgggcgcccacgcctttgtggaagtccccatggccgtctccatcaaggaactctgggaaatcgtcaatacctccgaggaaacccggaagcactgcatgatgatggaaaacgtcaactacggacgtgaagaactcatgtacctgaacatggtgcgccagggcgtcatcggcgacctgctgtacggggaagccgcctacatccacgaactgcgcggccagatgaagcaggtggaccgcggcaccggctcctggagaacctaccactacgccaagcgcaatggcaacgtctaccccacgcacggcctcggccccatcgcccagtacatgaacctggcccgcaaggacgactgcttcggcaggctcgtttccttctccagcccggccctgggccgcgccgcctatgccaagaagaatttcccggcggaccacaagtggaacaagctggacttcgcctgcggcgacatgaacacctccatcatcaagaccaccatgggccgcaccatcctggtggaatgggatgaaaccagcccgcgcccctactcccgcctgaacctcattcagggcaccctgggcacgctggccggcttcccgacccgcgtggccggtgaaaagctgggcaacggcaactatcacgaatggattgaaggcaacgaaaaactggcccccatttttgaaaagtacgatcacccgctctggaagaaagtcggcccgctggccctgaagatgggcggccacggcggcatggacttcgtgatgctttaccgcatcatcgaatgcctccgcaagggcgaaccgatggaccagaacgtatacgaaggcgccttctggtcctccgtctccgagctttccgaatactccgtggcccagggcggcatgccccaggtgttcccggacttcacccgcggagactggaagacgaccgccccgctgggcatcgttcagtaaaaaactcattccccatccggcctggagcttttccgcctttacagcgggcttccaggccggagcggattccccgttcagaaaacaggccgctgcaaggcgtgcctgttttttattggcgtgaacagcggttgcaggggtaaaaggaggcaggctgttccattggcagcccccctgttccttgatggaacgggcgctcacgttcataaagacggagcatgaaaacccgcaataagcattggttccctgcctgctgttagtgaaaaaggcaggaaaggaagaatgccttgcacccggaaggtgcaaccgcacagcctgaataatttatgaaagcaccggctcaactcatttcttgaggattctctttagattggcgacgtccaacaacaaattcaccgtttcaaaattccccttgtaaaacacgccccagttattgaagacgcagggcaattcctttgccttttgcagcgtatccaccctgatgagagataccggaacatcgttctctccacagtaccgttttatgatctcaatgttttgatacacaaaggggcattgcatatcataataaattgtcagctcccggctctcaattctcccctttttggcattcggcgcaaacctcggcgttgttccgtcaaaggaaagagcaagcagttcatagccatgactggcagcatccaccgcctcaaagccgaacttcttcgcaaaggattgatcggcaagccacgctttctgtttttcagctccgagcatgcaaacgccggatttgcccttttccctggcatcagccagacaatattccatcagcaattttccataccctttccccttgtagctgccggaaacccacaagcaatatatataatagtagttgtccccaaggatgggaacccaggccgtctccagaggggcatactcaatgaaaaccactcccttggcatttaactttctaaagacgtggccttccctgatccggccggaaagccattgccgctttgcttcaacgcccggatggggggcccggctgcggataatgcagcataaatgttcactggccagattgtccgccgttaaattgataaaatccgtattcaaaggcgcatcttccattctactaattttaatatccgcctgtggaaatgtcaaaaactcattccatgccccgacttcccgttacaggcacaagcccttttgttcatccaggcatcagcgggcgcattactcccttggcaaatggggcaccttacaacagaaacaaggctgtacctgctgaaaaacagctgtaacggcgtgagagacatcggtcctgaaccgttctgaagattcctcaactgcctttgacgggcgtctccggcgtcagttcatacgtcttttccgtgccattggcggccaccttgacggattgggccaccggggaggaaaggcggaactgcgttaccctgccgtccttccagtccatgtccacggtaatgttgccgcgggctttcagcccacgcacgctcccgtttttccaggcttccggcagcgccggcaggagatgcaggcggccggtgcgggactggagcagcatctccgcaaagccggccacgatgcccatggttccgtccacctgcatgggcggatgcgtggtgaacaggctgtccatcatgctgtggcgcatcatgccccgaatcatctcataagccttttccccgtccagaaaacgcgcccagaggctggcgcgccacgcccaggtccaggaacggcgggaatcccccgtggttccgcgcgccagcagggatttgcgggcggcttccgcccattccggcgtcttttccgggctgatccggctgccgggataaacggcaaacaagtgggaggtgtgccggtggcgcgggtcccaggagccgcccggcttgcgggcgatcatccattccagcagcaggccgtcctcccccaccctgggaccggccagaagatccctcttggcggccagttctttcctccaggcaatgtccacgcccagggtttccgcggcctgtacggtatcatggaacaattcccacacgatctgctggtcatgcgcgcagccgtcctccctggggccgtgttccggggaccagcccatcggagccaccagcgttccttccttcacgtccttcaactcccgggagattatttccggcgtcaccttcctgtcctccgtccggaagttgcttcctcccgcgtgcaggggcttgagctggctttcccagaaacggcagatttccttcatcatcgggtaagccgtcgttttcagatactccctgtccatcgtgaacaggtagcgttcccacagatgcagggcataccacgcggaagcgggcttgttccatttaaatccctggcccccgtaaatgttctgggccgtcctggacgtccagcccggagcgggcttgccgccagccgtcctgaactctttctcctcccgggtgattttacgcgcggcgggcgccatttcccggatgtaatccaccagcgggtcataacattccgccaggttggaggggagcactccccagtagcacatctggatgttgatattattgtggtagtcggaatcccacggcggaatcaggctgtaattccacaggccctggaggttggcgggcagattccccggctgggaggaggaaaggatgacgtagcggccgaagttgaacaccagttcctccagatcgggatcacgggcgtcccttccggcgtccaccgcctgcctgtacctcttcagcctctcgttgacggggagttccgccgtggcgtcctccgtctctcccaggtccagggaaacgcggtggtaaagcttgccgtaggcgccccggtgggcggctttcaactgctccggagccgccttgagcgcacgggccagaacggcgtcattcctcttgcggggcggctcccccttccagttccgggaagcgtccagcacgtaatccgtagccagggaaaccagcacgcggcaggaatccgcccgccggacggtgatggagccgccgttagccgtgacacttccacccctgggaagaacggcaatgcgcgcctcataggtcaatccgttcttcagggaaccctgcatcagaatcattcccctgccccctccggccgtggccgtaatcctgtcctgaggatgcaaggtcgccaggcggaaggaggcttccacggaacggggcctgtccccctgcaccgtcatggaaaccacctggtgcggaacgctggcgaaatactccctccggtaacggactcccccggagttgtaggacacggaagccagcgcctccgccacatccagcgtccttttataatcctgcacgttctctgctgccggatacgtgatttccagcgtgccgaacggctggtaggatccgaatttgacggaatccggccccttgtccttggcttccgcactgcaaaaacctccggaccacatgctgatttccgtcagctccaggcggtccttttccacgcctccgtaaatgagcgctcctattcttccgttgccgatcggcgtggcgtccttcgcccaggagttgtccccggttcccttctggggccgcgtctccttccattccgccggacggctgaaccggaccagggaggatttccatgccgttgattcctccgccgcgcgcaggacgtccccgtggaacagaacaccaagaaggagaaagaagaacggacgcataacggaaagatactaccatatatccggagccttttcaaagccattctttccgccggaaaggacgcttccggatgacgccaaaagccgcaattccatgaaatttttcctcactgcggaaccgtatgtaggcttgaggaacgtcccatgcgcacgcattttccaccattttcccccggagtggaacgccgttccccaaaacagcacatactgccccgccatgctttcctactgcaccaacatccatcccgccgaatcctgggcggaaacccgggaagccctccagacccacgttccccgcatccggcaggaactggccgcactgaattcccccctgaaggaccgccccctgggcatcggcctgcgcctgtccgccagggcggcagcggaactgctggaaacgccgcacgccgtggaagccctgaaagcatggctggacgaacacaacgcgcgcgtggaaaccctcaacggctttccctacgggaactttcacggccagcgggtgaaggaacacgttttccagccggactggaccacgccggaacgttttgaatacacctgcaacctgttccgcatcctggcccgcatcggggatgaaaacgcagacaggctgaccgtcagcacgctccccgcctcccacagctggttccatgcggaggaggagcgcatgttctcccgtctggacgccatgagcggattcctggacgtgctgagcaggcagaccggacgcctgatgcagcttgggctggagccggagccattcggccatttccacgatacggagggcgccatccgctttttcaacggcctgcgcaaccactcccgccgccccgaactcattgaacgccacctggggctgacgtatgacacctgccacttcgccatcctgcgggaggaaccggcagacaccctctccgcctgggaggaaaacaacatctccctctgcaaggtgcagttctccaacgccctggaatgccgcatacgcggggaggaagacctggaacgcctccgccagtttgacgacggcgtttatttccaccagaccagcatcctccaccggggcagaaccatgcttttcccggacctgccgaacgccctggcctacgggcgggattacgcggaggaaacgcgggattcccaatggcgcattcattaccacattcccctgtacgcctccccggaaccgcccctgcggggcacggaggatttcatcctgaaaacgcacgccttcctccgcagccatccgggcctgaacccccacctggaggtggaaacctatacgtggagcgtcctgccggaccatctgaaaaatcccctggccgcccagattgcccgtgaactgcattacgttgaaaccctgtaagagatgacccgcattcacaaacacgccgccctgaccgccggattcctgctgctggcctccggcctctcctcctgcaccctccttcccgcttcctcctccggcggcccggataccccgcggagcctgggcgcgcgcatggaaaagcatacggaagtcctgcaaaaagacatcgggcccagaaacgcccggcagcccaaatccatggaagccgccgccaaatacatcgccggaagcttctcggacatgggttatgccgtcaccttgcagcccgtttccggaggggatgcgaaaaaggggaccgccatctacaacgtcctggtttacaagcccggactgtattccaacaaccagagcatcgtagtgggagccaattacgattccagcgaacggctcaacaacggaagcggagcggccctgctgctggaaacggccaggggcctcaaggacattcccaccaaccacaacatttacttcgtcgcgtatgcgaacggagcggaacccgcatccgcctcctcaggagcctccgtccacgccaaaaccctgagcggcagcatcggcgcggccaacatcctgggcatgatcaacctggaaccgcaggaactggccgccgctgcggagcagaaacagccggaaccggaatccccgcaggaagccgtgctgttcatgaccacgctccgcggcaaggaattcgcgggccagtgcgccactcccttcaccaaatcctgggagcaggctccccccaccttccaccgggagccctccgccattgcgggcaatgaccgccattacgcggcgctgggcatccccacggtctcatgcctgtgcaagtacgccattacggattcccatacggaggactatgtgcacgccctgacggacatgattcaccaggtggcggacaatgacgtgcccaaaccggagaaaaacgccgcggcggaccagaaaaaaccctgacgcctctttctccccctcttcttttaccgggacagctttcttcttccgtggccgccgcccagcatcagcacgggcatgaaggagagcgccaccagcgcaatgaccatcggcatccagttgtcggaataccgctgcatcaggaaggaggtcagggaaggcccggccagcgtgccaatggagtagctcagcagcagaagctggttcatggtcaccagctcatcccgtgaggcctcttcacacccccaggccatggcgacggggtacagggagaaacccgccagccccagcgcgatcagggagggggccatcaggccgcctttcagcaccagccccgcgcatgcggccaccaccagcagggactggcatttcatgacgaaggcgcgcccgtatttgtccgccagccgtcccatgggccactggcccagaatagccgcggcaatcagcagggccatccagtaccccacggaggagtggttcatgccctggtgtttcaggaacaggggcatcaggcagtaaatggtacccagcactacgccggaaatcacgcaccccaccacgcccagaaacacgctgcggcgtttgagcagcgtccgaacctccacatgggtggaagacagggcgcccgcggaatcagactccaggcgggcaaacagcaggggaatcatgcccactgcggacagaacgcatacctccgtcaccaccagggacatgtcgctgggaaaccagcccaggaggagctggcccagcaccgttcccagataataaaccaccaggtaggaggccagaagaatgccgcgggttttcagtgttccggccctcagcagggcgctctccaccaccacccagaccagggcgcagcttatccccgtcagcagccggaggccgctccaggccagcgcgcctggaaacacaagcagcagcagggtggacgccgcgcataaaacgcacgcgtactggtagctccccttgaagccggccttgcggatcaccccgccggccatcagcgtgcccgccaggttccccagaaagaaaaaagcccccaccagcccggcctcccaggtggcggcgtcagactgttccatccacagcggaaccaccgtattcagaacggcaaacgccaccgtctgaaaaagaagccccgccagcagcagggcaataggccaggtaaatgtacgcatcacgataaagcggggactatagcaccaaagccgcagcagtcaaccgcctcttcctccggaaataaaaacagggaaagcattcccgcagaacaatacataaattattgataataaactatcaataaaccattaaaaaatatagtggactgtcatatcccccggcgcagggaggcgggcagaatcttcatctgctcccggtacttcgccaccgtgcggcgggcgatgttcaccccctgctcctgaagcgcggcggccagcctggcgtcactgaggggcttggaagaatcttcctccgcaatcaaccgccgcatcagctcctgaacggcgccggacgccacggcctccgcgcccgctccgcccagggaagcgcccccctccgccggaacgcccgcgctgaaaaaggcccttagctccttcatcccccacttgcacagcaggtacttgtcccggcacgcacgggaaaccgtggacacgtgcacccccatttcctccgccacctcctccatgcccatggccttcagccgggacggcccgaacctgaaaaaatcctcctgccgccgcacgatggcgcgggccaggcgcagcacggtctcctgcctcatgtccagggcgcgcagcagttcctgcccttcccggaatgccttgcggagatactgccggagctcccggctgccggagctctccgccatcagctccatgtaccgttcattcatggacaggcgcggcaggtactcggaagtgaggactacatccagacccccggaaggcccttcctccacgatgacgtcaggcagcagatggggattgccgccgggagcataggcgcagccggggtccggcgtcaggctgcggatcacttccagagcctccgccacggcttccggctccacgtccagcaggcgcgcggcctcctcatacttgtgcgccgccagctcccgccagcagcgcttgaccaggcggaaggcgagcgaacgcttcaagccgcgctgttcaagctgaatcaacagggaatccctcaaatccgccgctcccacgccgggagggtccatccccctcagcacgtccagggcttcctccatatccctcatgctgaagcactcccgttcttccagctcctgcggggactccgtcaggaagccgcggtcgtccagggcgtcaatcagcaggaacagggcgtcccgggcgcgcccggtcagcgcggaatgctgcgcctggtccgtcaaatgggttttcagggattccggagccaccacggactcatacatgaaatcgcggcgtgcggcggcctccgcggatgggcggccttccggcgtaaactcgttccagccgtcctcccgctcattccaggcgtctccgtccggaccgtcctccagggcttccggagaagcgtccggcaattcctcaagcatgggattggtctccagcgcgtggcggagaagctgcttcaattccagagcggaggcctggagaatctgcatcccggcctgcatggactgggaggcggccatctggcgcgccattccatgctgcagggatacctcactcataccgtcacaagctacaccaccccccggaatctggcaagggggaacgccccggcgcaagagctgccagcgcacagcagaagcggaaaaaaacaacaacttttatgtaacgtttaaaaaaaacatgcgtatactatgaaagtaaatgaaaaccttgcgtgcaattgcgttctccctcctggcctccctctccatggcgacggcggccgacctgccgtcccccctgctcccgttgccgcgggaacaaccccaatggtggaggcagcagtatgaacaacaggtagagcaggtgaaaaacaatccctgcggcgtccttttcctgggagactccatcacggactattggaaaagagaaggaaagcaagtatgggaaaaggaattcaaaccctaccatccctgcaacttcggcatttccggagaccagaccaccaacctgatttaccgaatcacggattccggcataccggcccagacggaacccaaactctgcatcgtcatgatcggcaccaataacaccggccatttcaaggctggggaagctccggaaaaaacggccatgggcattctgggcgccgtggagcacctgctggtcaggttcccggacacccatgtgctcctgctgggcattttcccccgcggcacggggccgcaggacaagctgcgccagcacaatgacaaaatcaatgccgtcctggcccagtgcaaactgccccgcaccacctacgccaatatcaacaagcgctttctggaccccgcaggcaagctcctgcccggcatcagcagggacaacctgcactttacggaaaagggttatgccatctgggcaaacgccgtgctgccctacatgaaaaaatactgcaagtaatcctctcctttcttcttcaccgcatgacggacggaagaaatgtccctcttccagcattcagtttatggagccgtagcgccgggaatatcattgggggaaatttacggctcctgcagaaacattttcaggcctttatgcttgagaatttcactactcaggattaaattacttcgcttaataccctttgaaaatgaaatttattctcgttagtgtagctatcttcaacgtattatgtgtatgttccggacttagagaactgtgttttgatgaatggttccatagcacattttctattatattttcatctattgccgcattactttttaccgtctcattcattttcttaagcaagaaaatatgcaagtaatctaaaatattgactttgagtaaattaatgaataaacaaaatttttatctatcaaggggaaattctaaaaacagagaacaccacgaattttcccattctcattatcttcttcatgacaatcgctattccgttgaattactgcacctgggcgtaaaagaaaccgccaacgccaaattaactgatcccccgatcacgcaaaggctgttattcagcagtttttgcatttgaaaagagtaatattgcataggcgaatctcctgacgaaaaacgggaaagtctctctacaacagacttccatgcatttgggcagtccctcatggggaatgtgccgattcttctctctcccatgcacccggaacccggaaaaaaccgcgtggaacaaaaaaattgctttttcccggggatgtcctagagtgcctctccgcaatgagcatgccgcttgccgacttgttattcctggcttttgccctctccgtagacgccttcgtcgtggcgttctcctacggcttgctcattaagcaaaaacgtttgagcaacggaatcaagctttccctctccaccggggcgggacaattcctgatgcccgtgcttggcttcctgctcacgggaaccgtgcaccagtacattgcggcctgggaccactggctgggctttgtcgtcttcaccttcctgggggtcaacgtcatccgcgagggctggaaccaccgcaacgaagaagagcagatgccccacgtcaccagcctgacgctgcccactcttctggccgtgggaattgccaccagcatagacgcgctggtggcgggcgtcagcatctatctctcctccgcccagtgcggcaccacccccaccctccacgccgttcttcttcccgccgccgccatcggcttcaccaccttcctgtgcacggcggcaggcttcttcctgacccggcggctgcaccgcttccccacgttccacctggaagcgggggccgggctcatcctcatcggcctgggcgtcaaaatgctctgcgaccatttgtgctgaaaaatgctccgcagcgcatgataaaaatactgttccggcgccgtagtaagtcggaaaacaaactggctccggccccttttttccgctatccttaaacaagcttttccacatgaatatttcacaccttcttctctgcaccgccctgctcgccgcacccgtctgcatggcgcaggatctgacggaacctgaaacggaagcgccgtccgccgccggccagcttcctgcccccctggcgcagaaaatagccgcgggcgactttgccgggctgcaaacggaactccgctcctccctcctgaaggctggggaacaaaccaaatccgggcaaaaactgcttcaggacaagcaataccgccacctgctgaacattcacgaactcctgcgcgtcacgggaccggacaacgtgaaggccgttttctccaaaagcccgcaggacgcggccttcatcaaggcctttttacaggacccggcgtgggtggaactctacctgggcgcgggcctgattccggaaaactccccggaagggcttcaaatcctttccgacatctggaaggcggacggtaaaaacgcggacttccgggactaccaatccctcgccaccggacttgcctccgtcttttccacaggccccatggcgggaaagctgaaaaccaactccgccaacagcaacccggtgcgccgttaccagatattcaagaaactgcatcaggaaaacaagctgcatcccggcttcatcaagctgcgcccgtgggaaatgcgcttcgtcgtgggccatacgtgggacgacaaatcctacgaatggagcaatgagcacgtcaacctcccctggcggcgctatacggacgcctgctgggccgccccctacacgggcaacaacttcttcggagacaccatccaggggcccctcttctacgtgccgtggcgcgacgtcaacacctccgcggaaaacactcaagtcatcggcggcgtctgcggcggcctctcctacttcggcaccatggcggcccaggcccacggcatcccggcctacccggtggggcagcccggccactgcgcctatgcggtgcgcgtgaagcgcggggaatggaaaggcggcttcggcggaccggacggaggcatgcacaaccacatcttcggcagccaggcccccacctcctacctgctgatggaaaacgtctttgcggacaacgccaaggcggaccaggcctacctgtgggccgcgcaggcccgcctggacgaagccgccggcaacaaggacaaggccatccaggcctggggggaagcgctcaagcaaaccccgctgcacccgttcttccgcacggagcttcagcgcctgctgatggaaaaggaaggcatgcagcccatcgactggtacgtgtacgccaaggacgccctctcccactacaaggggaacggctttgccgcgttcgacatcctgaaggacgtgcagaacaagttcctgatggacatcccgtccgaagaccggatcgcctggttccgggacctgcatgaaaccatcgccaccactcccacctcctgggcggtcaaattccagcccgtgctggactcccagtccgccttcctgaccaatccgcaggaaaaggcggcctatctggaaacggtcctctccacgcacctgaaaacgggggacggcaccaacttcggccaggcgctggaatgggccgtgaaaacctttgtggaaaacggccaggcggacgtcttctccaacgccttcgccaaggtagcccagcagacgggggaagccggagcctccggaaaagctcccgatcccaagaagctgaaggaagcctacggcaaagccatctatgccacggaaatggcccgctccattccggccttccagaccctgagcaaggcggccgcctccttctctgacgccgatacgtctgccaacacggtcaatgccgccatcccccagggttggaagctggtgcccgcggacggcatggtcaggtgctccaccacctgccagtgggacagcccgtgggaccacatcaacctgctgcgcccctgcggcggctcccagcatacggacaaggaagcgaaccccaacgtcattgtggaactgaaaaatggcgtgaacctggccgggctggtggtcaccaagcgcaacggcaatgaagaccggatgaagaagatggaagtctccacctccacggacggagccacctggttccccctggccgccacggaaaacatgcccaaggaatgggtcatcaccgctccggaaggcaccaaggccaagtggatcaaggtggaagccaagaacgcccagccggaattcatgcacctgcgccacatcctcgtttacgaaaaataacccctgcacccttttccattaacgccatgtttcatcatctcaacatcgttcccggcctgctggccgcagccctcctcctgtccgcgcccgtccaggcggccctcccggcctacagcgccgtgaaggacgaggccaaaaccgtcaacaaatacatgatcgtcgtgtgggccggcacggactggtcccccaaatcgcgcgaagtcacccgcgccgtggagcacctggccaaggactccccggaacccgtcctctggtgcatccaggatgaacgggaggaaatgacggaagaggaaaagaagctgcccaagcctcccggtgaaatctggaacatcccggccatccaggtggtttcccccgccggcggcatggtcttcctgtccgaaggcgtttccaaggaaacgctgcccgctgtcatgaagcaggcgctggaagccgtgaagcagcaggaaaaggccaatgccctgtgggaaaaggcggacgcctcttccggcgcgaacgcggcccttctctacggggaaggcctccagcagcttcccccgtacgcggcctccgccaggaaggacattctggaaaaaatcaagaaggcggacccggaagacaccaggggcatgcacttcaaatacaccttcaagcacctgccctatattgaaaaggtgcagcggatggtggaagactccggcaaaaacggcggccagaaggactacaaggccgcccatgcctatgtggacaagcagctcaaaatccccggcctgacgcccctgcaaaaacagcaggtcatggcggccagattctggctctaccgcagcgaggggaaaaaggaccaggcgctgaaaaccctggcggacatcgccaaaatctcccccaagactctgatgggaacaggcgcgcagaactactaccgcttcctgacggaacccgtcaccctcaaggagccgcgcttcacgggctatgacctgcgcccggaatttacgcccacccgcgtcaacatcggcagcatgctcaacggccccggcaactacaagatcaccttcaagatgaacagcggcggctgcaacatccgcaatccccgcttcatgaggggcagccgtgtggtcagcgaactgcccaaggaccagcaggacaaaaacggccgggaattcactctgcgcctctccggttccgaaaagccggacctggtcttcgactgccagggccagggctggtttgacgcggactgcgacatcatcgtgaccaaggagtgatctctttaaggaccgtttgcagtattttctaatattttaacacagcaagccatccaaatgatggcttgctttttaataatttatctagtaatctatagttgttatggataataacctatggattgataacttgatatctaaaagaggtttttcaaaagctcaagcagaagaggtgcttggcgaggctaagaggttcgtgaagagtgaagtaagccttgaagaaataatggagtatataattgaagaggagattgatgacgtagaatatgccgtcgaactaatagaaaaccaaaaagatattagttgggcaacagatgaagatggcaatgttgctactttcgatgaaatttttggtgacgactagtaaaaaataatgttatccgcaggagagaaccaaaaagtctttttttgcaggcaccttttgttagatactcaaagaaaatttgaatctattgcatctaacagacacttacatgtatgaaggtaaaactaaccttcttttttaattcttcgtcaaaatcactatattttacacttaatttcatccatatattgaaaatacggcggtataaaatatattctaaacactgttacgagacagatatttaagggtagtttttctagtcttttgtcttgtggaggatcttttccgccagcttgcggcggtattccatgcgctccttgatgcgcagttccagcccgtttccggtgggggtgtagtaaacgcggccttccggcaggtaggcctgggggacgtaatgttccgggtaatcatgggaatacaggtattccagcctggcggcgtccgcaccgccggcggcggccagcttcttgcgcgtgggcgtccggaggtgctccggcacggccagcgtttttccgttgcgcacgtcatccatggcggcattgatgcccatgtaggcggaattgctcttgggggccgtagccaggtaaacggtggcgtgcgccagcgggatgcgcgcctccggcatgccgatcatttccgccgcgcgcgccgcgtccagcgccacgcgcagggcgttggagtctgccagccccacgtcttccgacgcggcgatgaccagccttctcccgatgaagcggatgtcctccccggcttccagcatcatccccagccagtacagggcggcgtcaggatcagagccgcgcatggacttgatgaaggcggaaatcgtgtcgtaatgggaatctcccaggcggtcgtacttgatggccttgcgctggatggattcctccgctacggagaggttcacatggataacgccgtcttccccggcaggggtggacagaacggccacttccagagccgtgatggccttccgggcgtctccgtccgccttggcggccaggtggttcagggcttcctcctccatgtccacgcgggaggctcccagcccgcgctccgcgtccgccagggcacgcttcagcagggcggccagctcttcctccggcacgggttccagcgggaaaacctgggagcgggacagcaggggggagttgatcgcaaagtaggggttctccgtcgtcgcgccgatgaacctgaccgttcccttttccagatgggggagcaggacgtcctgctgcgccttgttgaatcggtgcagctcatccacgaagaggacggttttccgcccgtgcatgctcatcctcatctgcgcctgggcgattttctcccggatgtccgccacgttggattccaccccgttgagcatcatgaaatgggcgttcgtcgtccgggcgatgacggcggccagggtggtcttcccgcagccgggaggaccgtaaaaaatcagggaggtgaacctgtccgtttcaatcgcgcgcctgagcagctttcccggcgccagcaggtgcctctgtcccgccacttcatccagagtgcgcggacgcatgcgcgcggccaggggcatggcggacatatccgctccaggctcgaagccttctctcgcgtccgcttcctgtaaactgaacagatccattggaggtattttacccgctgggaagaccggagaaaaggccaatccccggaatccggcaagtttcacggagggaacgccgtcccctccccgcagaaagaggaggaaaaagagaggagaagaaattacccgccccgccaaacggccatcagccaggggagcccgcggcaaccggactcacgccgcagaatgccccttccccgcggcgtccagtggaacggtcaagccccgctttaaccggacacggaccagcaggacagcatcagaaccatgcagacaggggcaagaatactgaacagaagccccgtcaccgccagcatcctgcggttcacctcccagtaacggagggaggcgatcagcatccagatgggaagcacaatcatgtggatgagcgccagaagcccccagcctgccagcgccagcacgaaaagccagggttccgagccgtccgcatcattgctcggcatgaacaagccgaagatacggtacacgaataaaaaggagacgaatgcggcaaaaggtatccatccccagcgggcttcctccttccggcgggccatgaccagttcaagatagggatcattaaacgcagctagatgattggcagaagtacttctgaagggatgcatatcgtttttggtctctattattaacccttcctcctgtcaatgatattcaatcccggcgaccgcccttcctgtaagaaatctttttctctaacaaatacgaaatatcaacttccgccaatcatcttattgtagctgcaaagtattgcctcattccgggaaacctgcttgatgatgaatgaattttcattcctatcggaatgctatgcttctgccattcccattatggcaaaatgtctttttgaatgattcagatgatagcatcggcgaaatttgtcatacatgagccattccggcatgaaaaaagactgtctccgccgcaggagcggagacagtccctgaatgatgatgaaccggaaattccggagagttacttgcccagaattcccttgaagtattccagcgttgtcgccaggccttccggcagggtgtgcttgggctgccacccggcgttgcggagcttgtccgcacaggcgcgggaatgcttcacgtcgccggcgcgttccggagcatggagcaccttggaggaggaacccgcggccttgatgatgttctgcgccagttcttcaatggtgatctggccgccgtacccggcattgaacacgccggtgacttccggatgctccgccacgaaggtgagggcccccacgatgtccttcacgtaaatgaagtcgcgcgtctgggtgccgtcgccgtacacggtgatgtcttctcccttgacggctttttcaatgaaaatgggcaccgcggcggcataggcccccttggggtcctgccgggggccgaagacgttgaagaagcgcacggcggccgtgttgaccttgccttccgcccggaacatgttgaggtagtattccccgtccagcttggtgatggcataggggctcttgggttccgggtacatggtttccagcttgggcacggtggggttgtccccgtagatggcggcggaagacgccagcacgattttcttaaccccggcggcggaagcttcctccagcacgttcaggaggccgttgacgttgatgtcaatgcactcgctgatcttgctcatggattccggcacggagacgagcgcggccatgtggaaaatgtagtccacgccctgcaccgcctggcgaaccagttcgcggtcgcagatggagccttcaatgaaggtgtgcttgagcccgtccaggttcttgaggtagcccgtgcgcaggttgtccagcacgcggatttcctccgccttgtcctgatagtgttccacaatgtgggaaccgatgaatccggcgccgccggttacgagaatcttcatgtgtttttccgatgttggtaggtattggttagtagcggtccacaacggccttcatttcatccatctgcgcctcgatggattccaccagggccatctgcgtgcggcagcggtccaggttatgttccgggcggtgaatcttgaagtacacgtctccggacaggtagtccgtcaggaagcggatgccgcattccatcgtgagcagcttgccggagaacggcagaaggctcttttccaggggcgtcaggaagctcttggcggagctcaggtaaccttgaaccagggcctcaaacatgaacatgcgcatcgtgaccttggagatgtccttttcatcttccgcggcgggagacgtggccgtgcggatcatgtccccgaagtcgtaaatggcggagccgggcatcgtagtgtccaggtcgatcacgcatatgccttccccggtcacgtcgtccagcatcacgttgttcagcttggtgtcgttgtgcgtgcagcgcaggggcagttcgccggatttcaggtagtccaccaccagatggcagtcagcctcacgggaaaggtaccagtctatttccttctgcacttccttcacgcggcccagggggtcggactggatggcttctttcagagccgccaggcgggaagtggtgttgtggaaatcggggatggtttcaaacaggggttcaccgggaaggtccgccgtgagcttctggaactcgccgaaggcgcgcgccgcttcctggcactgcctggtggtttcaatctggtcataagtgcgtgcgcgttcaatgaacgggtacacgcgccagcagttgccgtccgcgtccagggcgtacggcttgccgtccacggagggaaccagcgtgagggtgcggcggtaggcttccgggcactgctcctccttcaggcgcttcagggcgtggtccgtcacgcgcttcacgttttccatcagggggatgggctgcttgaacacgttatggttcacgcgctggaggatgtagcggaggcgctgccccgcctggtccacccagatgcagtaggtgtcgttgatgtggccgctgccgtaggagtaaccgtggacgaagtcgccccggagatcgaacagggatgatacagccttgagatcgtgcatgggaaaagaggcttagttgagcttttcagggtatacgccctgcttgatgagtttgttgatgccttccacaaccatgggcttgtccccgggataggtcatgccgaaccaggtggaggaggtgggaagaacggcgcagtccgcgcggtcttcatgaatcagggcgtccaccacggtgggaatgaagcattcgctcttgggttcctggccgtgttccttcaggaagtcaatgaaacggtcttccgtcagctcaataaaggagggggagaagagccagaagttcatggaaaccagttcgccggggtccacgggcaggcgttcgcccttcaggttgttgccgcgcaccacgccgtcttcatcagcctggattttcacgaattcctccacgccgtccagcaggccttccttgatggagcagatgccgcggttcacgtccccgttgtcggagagggtgttcttcagcggatagccgatcatgccgtaatgggccttcccgggttcatccgtggtggaggtcaagaacttggcggcctgcacaaaggcatccgccccgtaaaagtcatccgcgttcaccacggcaaagggttcctttaccacgtggcgggcggcgcgcagggcgtgggcggtgccccagggcttttcacgtccttccggcacggaaaagccttcaggcaggtcgtccagggactggaaggcgtaatccacctcaatcttgccggcaaagcggctgccgaccttttccttgaaaatatcttcaaagtcacggcggataatgaataccacttttccaaaaccggcccggatggcatcataaacagaatagtcgagaacgacttcaccattgggacccatcgggtcaagttgcttgagaccgccgtaacggctacccataccagctgctaaaacaagaagtgtaggcttcataatacgcgggtcattatgaccaagcctccccgtttggcaactggaaaatgccggaaaaccggagaaatccgcccgttaaaaaacgtaagagcaccaaaggcccagcaccacttttttgaaatcgtcccgcccgtagccgcaataccaccccaggaaaggctccaaccgcagactgccggaaacggcccaccgcgcgcccgtgcgcaccatcagttccttcaagccgtttctccccaggtaatcatgggaaaaccccagggaaaccgtattcaccatggcgacggattcacacagcaggggctgccaggtaacgccccactgggagtacatcccctcctgcccggaatcatacaggaaagagccgctgaaggaccaggacggcatggggttccacttgagggacaggccgggctccgtcccggttttcagggggcaggaatcataccactgcccgttgacaaacagtccggctgtacactcgtccgccaggtaatactgaagttccccgtgcagggtggtctggctgaaattgcgcccctgccagttgcggatggcgaagagttccccgctgaccgcccaggaatccgacagggaggccccgccggaaatctggccttccacggaattgggccccatcttttccccgcggtggatgtagtccgaacggtagccgcccagcaattccccacccatgcggatgggggaacggccgtccacctccgtcaggggcgggggtccgtcatacccccgtacggcctgcacggcgcagcacaggatgatgggaaacagcctcatgaaggccttttaacacaatcccctgcaccgcaccaacgccaaaacggtgcatgcacattctccgggcttggcaaaaggggaatctgcccttaccctctcgcgcatgattcatttcaccctgttcgggatacctgtttacatccgccccagcttctgggtggtgctggccatcttcggcggcgctctcagcatcaacagtgtggaaggcctcatttatccggccctgttcgtcattgccggcttcgtcgccatcctgtcccatgaaatggggcacgcgctggtgggccgcaggctgggcgggggccagcagacgatcgttctggaactcttcggcggcctgacgagcagccacggcatgcagctgacccgcggaggaagggccctcatgattctggcgggccccatgatgaccctgctgctgggcatcatcagcctgtggattacctggaacatcgtcgccccggtcatgaccgcgcacaacctgaccttctgggacctggccatcagccccttcacggcggcggccatctccccccagctttacatcctctcctgcctcatcatgatcggggaatggtggacgatcctgaacctgctgcccatctaccccctggacggcggccagctgatcgcccaattcatccgctcccccaaaaaagtgttcatgaccggattcatcacgtccatcattatcgggctgctcagcttccagctcttccacggctacttcattcccatattcatggccctcttcgcctacagcaattaccgggaatacagaaacgcccccttttaatattccgagcttcctttgcgggccgcgcccgctccattcaacataccatccaatatgtctcaacaaactgcaatcacccccacccgcgcccaggactttcccgagtggtaccagcaagtcatcaaggccgccgacatggcggagaattccgaggtgcgcggctgcatggtcatcaagccgtggggctacgccatctgggaactcatccagaaggacctggaccagcgcttcaaggacaccggccatacgaacgcctacttccccctcctgattccgatttcctatctggaaaaggaagcggaacacgctgaaggcttcgccacggaatgcgccgtggtcacccaccacaggctggaagcgcagaaggatgaagccaccggaaagacccgcatgattcccaccggggagctcacggagcccttcgtcatccgccccacctcggaaaccgtcatcggcgcggccttcgcccgctggacgtccagctaccgcgacctgcccctcaaggtgaaccagtggtgcaacgtgatgcgctgggaaatgaggccccgcatcttcctgcgcacggccgaattcctgtggcaggaaggccacacggcccatgaaacccgggaggaggccattgaggaaaccctcaccatgcacaaggtttacgaggacttccagcgggatgtgctcgccattcccaccatccccggggaaaaaacggaggcggaacgcttccccggcgcggaacagacctacacggtggaagccatggtgcaggaccgcaaggccatccaggccggaacctcccacttcctggggcagaacttctccaagtcccagaacatctgctttgccgggagggacaatacccagcagttcgcctggaccagctcctggggcgtctccacccgcatgatcggtgcgctcatcatgatgcactccgacgacgacggcctggtctgcccgccccgcgtggctccccagcaggtcgtcatcatccccgttacgcccaaggaagaaagccgccaggccattctggaccactgcgaggaactggcacgcaccctccgcgccaagaatttccatggccagccgctccgcgtactggtggacaggcgcgacctgggcggcggcgccaagaaatgggaatgggtgaagaagggagtgcccgtgcgcctggaaatcggcccccgggacctggaaaaaggctccgtctgcctccagcggcgcgacctgcccgtcaatgaaaaatcctttgttccggaaaaggaactggttgagaccgtcacggacattctccagaacatccaggatactctgcttcagcgggccatcgccttccgggacgcccacatccgccccgcctccacccttcgggaactggaagaaaacttctccggagaaggagacgccgattggctccaggtgccgtgggacggctccccggaagaggaagaggaactcgccaagcgcctgcgcatctccatccgctgcatcccgctcggcgaactgggccgcggggaacccgctccctgcatcctcaccggccgcatgacggaacgccgcgtcctctgggccagaagctactaatttccccattgactccctctcttcacgggactgttccagggcacggaaaacgcgccttccgaaacagccccgttttttatggaaacagggagttcttcaagattttacacattctttccgcaaaaaccgcttcatttcggacaccgacgccattctgccgttataagggataaatacatgctcttccggttaagaccacaccgagatgccgaccacagtcatcccttggaggattgcgtcccctgatggcgggacaaaagggacaacctgctggccttcgcccggttgaaagcgcagaccggcctggactcggaagacctgctggcggaaaacgtcaagcggctcgtccgcgccgtggcggaaaaccgcctggccccggagccggatgaattcaccccgtacgcctttaccgtcatccggatgccccaggcccagcaactgctgaaacctacggaaccacgctgcaaacgatcggttaacgaagatacggcgctcaagaacaccatctgccgcggcaatacggagcaggttaattttatctggaacagggagccaacgtcaatgccgtacataggggaacgatttccatgctggaccacgccaggaaccgccatgacgccgccaaggaaaaactgttgctgaaacatggagccaaaacggcctcggaactgaacgagcaacaaaacgccgccttccccgaagtcaaaccggaacaaccggaaaaagcagcatggcaccttcccgtcctccccgctccttccacagaagcatcagtcctctttaaaaggtacggcagcatggccctattccggtgaacatgaatttttctctaaaaaaatcttgccaaatccggataaccctatatattttctgccacacggatgccgcaaggctccggtcatccaaagcggatgtagctcaggggtagagcgcaaccttgccaaggttgatgtcgtgggttcgaatcccatcatccgctccaacagtttctgtaagaaaacctacgcaaaccttgatattgctagggattatgaataaagtacacgtaagaaaacttacgtaaaccatattacaaaacccttacaggaaatattacaggtatgagcaagcctttctacagcggccgtctgtccatcaacaaggaaaaatcttccccttactggatggtaacattccaagggccggacggcaagatgcggcggcgctccaccaaggtgcctgtgaatggcggagagttcgagggcgaccgcatcacagccaagctggcggaacggctcgcctaccagcggggtgtgcagattgcctgtgcggaggcggaagaatatcaggcgcacaataatgtatccgtgcgtgcctggtgcgacgactacgtgaggcgcaaggcggcgctggtgtcggaagacacggcacgcaacgccaggacggcctacaagcatttctacgcttatctgggcggtcgggctgatgccccgctacgcctgatcaccaaggcggacatcaagggcttcgtggcagcccgccgtgaagaggtgcgccagaagacggtggccaaggatttggccgccctttcccaggcattcacggacgccgtggattccgaagtgattgaccgcaacccgtgcaccggcgtttccattcccccggaccgcgcgggcgagaaactgcacaaggaagcgttcaccctggacgagatacgctacatgattgagcatttccctcccctgtggagttccgcggtacgctgctcatttgagaccttcggccagaggctgggggatattttgaggttgaattggagtcaatttgactgggagcgccgcgtcgtgcgctttgacacaggcaagacggggcgctggatggaccaacccatgagagaaggcttttaccagtgggcgcttgcccgctggaaggaagagggggaaccagcggacgcattgcttcatgccccgctccttgcgttaggggatggggcttccgcccagttcgggttgttattgagaacgcacggcatcggcgtggtgcacggagctgccggtggccgccgtcggagaatgaacagcaagtcattccacagcatcagggcgacggccgccaccatgttgcaggcttccggcgtttcccaggggctggctatggaactggtggggcatgattccaccgccgtgcatagcgtatacatccgcccctccgcggaccagttgcgttccgccgctgaatccctgccggaactcctgccttaaaaaagccctgctcccagaccaggaacagggcttgcaggtaaaaagccgggttgacttcacgcacccatcaggcgcatgtacttggttcttacctcggcaaagcgcggatcgtcagaattgtggaaggctgcgtaatccgggtgttccgggtcgtgcatcatacgctgggcttccccgcgggcctgttgctcctgtcgtccaggtggcacaggaagagccggttcatccaaaagtctgcctaccgcatccagaattttgtacatggccggatgatcggcaatgcccatctcattgaacacgctctgctcgaccccggccatgcggcacaggcgcgcagccatttgaaccgctcgcatctggcgggcgtcgctgtcacggccccattcgccatcaagcttgctccacgcctcattcatggccgcctcctgggcccgctgctgttcggccgcattggccgccatgcgggtgtccatgtccttaatgaaggctgaaagcccctcaacgggcagcccgtgagccttgccggtttcggtcagtagattctgcagcgtctcgtcaccagtgaacgtttcgtcaaaggccagcacgtaatcctcctgggcgggaggttcggtcttcccaggctccggatttgccggaggcgggtcagccggtggattggcgggagccgtgtttggatccggcacggggtcggccagactggggcggccaggcgcagcgggagggttaggattcccgccctccgcctccattatcaggggcttcttcacggaggaatcggttgtggtataatctgaataaggacatagtggttactctgtggtttcttcttctggttcgttgttgttgcctactaccatttcgatgaacaaaatcatctcgcggtaggcatctcggcgcatggcgtcaagggggtcgtaggaaccggccgccccctggaaacagggaaggtcggtctggaaatgtttcttcagctccgccagaacttccggatttctgaaagcttcccggaaaatccttctgcggtgcttcatgcgcttttcgtactcatcctggggatttgtcttcatgctgtttgtaaagcttgttgcgcctgggcgttattcctgtttgccacggaggactgttccgcaagggcagcctgcgtggccgcttcctgctgctgcttcctctcggtctccttctgctgcatctcttcttccgacgccttgcactccatcggagcgcccttggaatcgtaaatcagctctccggccttgatgaggttcacaatatccagcaactccggccgtccggtcatctgggatagggtgccgatggattcgagggccgtcatcaagccgtccgtctgcgtccgggcaatcgcctgggcgatcttgcccataaacagcacctgtggaacagccaaacgcgtggggactccccggcggttggtctcaaacacgcctggcaccgggtccggcagcttgccggcgcggtacagcaatgccataatccgctggcacatcatccggaaatcgctcacgaataacgtgaaagagggggtaaatccaagcaccttttcagcttcccgggccgctacctccgtggccgtcatctggcggtcaatgcgggaaacggtctccagcatgggaacgtaaaaagcctcttcaatcttggcgtacagtccgcgcaggtattccagtccaatatcatactgcccttgtgtaccccattcgcgtgggagcccgagattggccgcttcggcagaaatggtggtttggccgccggcgcgcaagtctacatcaccgtactgtgaagccagcaggaaaagccttgggtaagccttcgtctgtcccagcgtgtacagaatcttctccatgtcgatagccatgcgaatggtgcgccgtgcgtgccacgcaggactcaccccgtagggactatcgccccagcgcaggaagcgtgttaccaggaacggaaactcgtaaaaaccgctctcaaacacaatcttcttgtcgtccagggaaataatcacgtcctgccacggcctcttcttggctggcaaattattggaaagcagcctgccagcctgattgggaagcacgcactgaacaaactcgaaagaatccgtataccggcgctttgcatccttgagagctctccgtaccttggcccccagggcttcttctccccatttctgtgcagcctggtgagctgtcagcctgaaccagcgcaccagcgtgtccacgtctccggactccgattctgcaatggcataagtgcccgtggggatgtgcctaaaaatcagctgtttgttgagattcatctcggagaacatgcagccggtcccggtcaggcaacggtccagatatacctcgtgcatgactgaatagaaattggaaacggcaagctcccgctccatcacttccgtggccttgttgtaccagtcattcaaggtctgattcccatccttcttgtagccaacggggcgaagtgtgaaccatcgcctgtccaaaggcgtgatgtacgtcaggtgggcggaagccagctttttcaggctgttattggcaacatcactgtgctccagtccgccgccgttgtccggtacgctgtctggatgggcattgcccgtggctctgggcatgatgatgcggcgcatttcatcccagccgccttcaaaggcggcgcgttccgtgcacaggttatccgccagggcaatgtaatcgcgtacctccatgactgttatcccagggttttgcgcagcgtggacaggccgccggacagattcggattattcaccgtgtcggacagcttcaatctgcgcttgctcttggtctgtacgtcctccgatgcgtccgaaacggacttctccgtggcggccgggttcagaggttcttctactgccggcggggtcggggcttgtgtgactttgggtttgaagatggagcccatggtaatttactggttgaggttataggcatccacgccctgcgcgatggcacgggcaatggcgccgggagtatcgcgtaacagggaagcgtctccggggttggacaagaaaccgcactctaccagcactgccggcggcacggtcttgcggagcacatacaggctggtcttgtttggcttacaggaccggtcaggacgtgcctgtacatggtcagcgcgccccggcatgagcttgcacagcggcccggcaatggctttggccaatgctttgccccgcgcagaatccgtgtaagaaccgtcgctgtggtaattgcggtgatggcagacatgggcaccgcaggcagtagctgatcccgcagaatcacagtgtagggaaagggaaatatcatagcctccggcgttgatggccctgacggtggcggcaaggtcgtcgtcgttatccatgcgtggaaagtcaatgacggtgacggcgtgcccctgggtccgcagcatgggggcgagatggtccgcgatggtcttggccgtggcgtgttcttccagtccgttgccgcgggagccggtattgttggcatgtccgatgtctaaagcgatattcatttgttcaggtattggttgataaggtgatctggtacgtcgtattccgcgtaggtgctgttaaggtgccattcttcgtgctgggccttgtaggctgtacgctgctttctgctcggcaggatgtgcatttcctgcttgcgtccaggagttttaatgacgagtaggtaaaggtattgttccggcatggttaattaagttataaactatttcctgtagaactggttagaacttgtaagaaaaactttacagttgggggtagtcccgtttttggagctgttgctggtggtaattctccaaatgctggagacgagtatccatcgtccgcagaatctccgccgtatgagccgcgttggtagtctgttccttcaccacctcgcggaaatccaggtagatgaacacggctatcacaaaaccgccgaaagtgacgatctcgcgcgtataatcacggatcactcccagatattccttgaggggtttgcacatggccttactttttaagggattgaacgacgggcggcacgtcagtggtgggctgggcctggctgtaggacaggcgccccggttccagcaccacgcacgcgccgtccctgcatatctccgtccgctccgcagtcacgtctatggtatgcccgcagcctcccagtaaagcggacgccgcataggccgcccccgccaggaccatccacaaaaggcgttcccaccatttcaggccgggtttagttttgcttttttcgtaggcattcttcatgccctgcttccccgcctccagggcggccttcttttgttcgtcacttaacttactcatggttttgctttgtgaagtatttgaaaaatgccacggcggcggggtccgtgatgacgaattccgggtagtccacccgcgtgaacgtccggcgtccgccctgggtattgacggcctcgacggacagcgccacggcatcggtggcagtcggcggcctgtcgacgtcatctccgtgagttgtcacctgcaccagcctcgcccatacctgggaggcttgccagtcctcgcccatgctggcaatcgcggccaccgctgccgccagggccggggcttggtcggctgggatgccgtcctgcgtgtagcggtaggaacacacaaagccgttgctgtctggaaatctggcggtcatgacaaattcgtcccactgtcctgggttgggaaactgtaaatgtatctcttgcatggtgttattgcgctaattggttgatttccacgacagcggtctgggcatagtggtggccgacaaaaacccacacttgccggggttgcccggtcgtgttgggggcaagcgtcagggtgatttggccgcctccggctggtatctgctccgcggattggctgcaccatacggcggcggggtcatgcccgcacatcgtgtcgttaatggcgtacacagcctccgccagtgtggaggataccgtcagcgttacttcaccgccttccgctcccacctccagcgcggaagccgtcacctccggcacgggcttgaccgtcgcatcacgcatcacaacgcgctccatgatcggccagacatcgttgactcccagcgcgggggctgtgtcaatcctcatgcctcccatccgcagccccacttgcatggtactgctcacctcgtgagccttggcttttgccgtgaagcaggccgtgttgccgctcccgcaaaacaggcttgtcatcggcatcacgtagtggccgtccacaaacatctcccagcgattctcaacattggcgtggtcagccgattgccggggagttatcgccacagaaagataagtaacgctgggcgccaatgcccacatatactgctgatcacctacatcccgcccgtaatccgtgccgcgcaacaggcaggacgtgctgctgcccaggtagcccttggggtagatcgtcacctgccaggcgggcgtcatgtctctgctggttgcgccgttgacagagttgatcagcgggtatctgtaatttgcattatcccaggcataatctacccaatggatgggatgcgcataacaatccgccgccggattggtcgccgaggaatagccttgcgccgtactccccagcaggatagacaccttgtcagagccgatgatgcgccacacagaggcggcggcataatctctattacggctattgcccatgtagttggcaaacttccacgccccagtgctgcaaccaatcagagatacgccggcagccttggtcatcgtgaccagcatgtcctgccaatcgttaccgtatacgccctccttgatggatacgttggccgtgcccacattataagcggcggacatctgcatctgcctcacaatggtagttacccaggaggggatcagggtctccatgtagtaccccatccgccgccaatcatctgcggcccgctgctctatcagcgcctcgtaagagatagcctcctgggccgtggcaggcagcggcacgcgaacgccgccgttggcagtaacggtgcccgtcgcagtcagaccgccggccagcgtcatgttgcccgccgcgtccacctgcgggatggcggcaagggcctgctgggctgcggtggcggagtcagaggcattcttggcggaggtttctgcattggtttccgccgtcttgattctgccttccgcctggtctatttcccctttggcggtttcagcctgttcgacaaagggcgtgattgcctccatggcttccgcctggaccgtctgcactgcctgcacggcttccgtctttgccgtttccacggctgtgacagcagcgccttgtgcgctggctaccttgtccgtggcggttttctgcgctcgccctacagcaagaacggaatcagcttgcttggcttgtatgacggtaacggcttcctctttggccgcgctgatcgtctgcgtaaaatctgaaacaatcccttccacagccgtcttggcgtcattggcgctcctggcatcgtgggccgcatcagcggcggacgtgctggcagaggccgcggcattgccagccgccaccttggaggcttgagcggcgccggcatagccttccgcttctctggctcgttccgcggcggtgatagccgctccggttgccgtcgtggctgcctgactcgctgtgtccgcgtccgtgcgggtgctggaagcatcctgctgcgcctgctgggcggcgagggaagccgccgtgttggaaagccactgcgccttgatggtcttgcctgcctcgataggaatcgcaatgcccatcaccggaatgtcgtacacagtggaagcctcaatgggagtcacggactccacagcgccgatgtaacccgcaaatagccgtaaatcctctccggattcatcctgggcatggatggcatacggccagcggccaataggaagggcgggaaaggtaagctccaggtaattctcctgttcgccatgctcgattgtgatgggcagctctccttcctccgttttcacggtgcccgcaaaagaaacgcccgttaccgggaacggagattgagtcacgtcctcacgcaaaagccagcctatgcgcttggcatagccggctgtcgtggacaaatggcgtgtaatccccagaaaattaagcatgcctccttcatgaggcaaacccggaaaaatctcaagttgccgagtgtcactactttttgccggactttacgggaggatcaaatggcagggacgccaaaagaatcataaagttctctcctgcatctactttcatcttctctggtgcataggctccatccatcttgttgagctcggcaatggctgcaattttcgatggcatcttgaatttcatgccattttcatcaatggaagactcttggcaaagctctgacgtgttgtcaatatcaccgatgggagttgtcacaacgcgggaaagccattccatgcgttcctgcttggtcagcacggcggatttattcaactgggcgttcaattcgtcaatcattcgcacaatttcagcatctttggacaaacgggaagccgccttacttgccgcctcattgctcatgtccttgcgtttgtaagccttacggtatgcgtccgccttggacaattttccatcaaccaggagccttgcaaactccttcttcttctccgtcgtcctggatttgttaccctctctcttcataccaatattttaccctcctgtttttcggcgtgtcgagttgccgagtgtcaacgtttcttgccgatagcatcaacctgctgactttgaatcctcaactccatccaaaaaatcacgcccctgcttgctcaaataatgcacacagggacgtgacccggttttgaccacgtcgccagtccttgccaggtaatccagcctgtgggacacgttactggggtccagatggcacctgtcagcaatctcccgtgacgttcttcccggatgatctcggacctccatcaggataagcagttgcgacggccgcaccctctggcggacaatgttccgcaacaggtcttttctgactgacgactcgttcattctccctcccttctcatgtagcgttcaaagcagtagtccggcgcgtcctcgaccctgcataccacgttttcgccccggtacaggcgggaggcgatacgggcatccaaatgttccccgatatgtttcggcagcaggttggaggtgagcatcgtccatttcccgagccgtccgtcaacaacacggttcagcgcggacagaatggaaggcgtggtgttctcagctccgatgtcgtccagaatcagcacgtacacctctttgaccagatactccacgaatgcccagtccccggaacgaagcatggaaaccaccttttgccacttccaaagctggattggaatcgtggggcgctctttgaccaatgcagtcctcacggactccgccagatgcgtcttgcccaccccggaagcccccaacagggaaagccagcggcgcggacgaaccttgttcaccacgtcgttgatgaaccactgtgcctcgcggtgcatggcttgaacctctgggtgcactcgctcgtcaaagccgcccatatcgtaccgtacaggcttgtaattgcggacaatcccgttttgagatggcgcaagggcaacttgcccagccaagtgttgaatatcatccatcattcgtatctccttcctgcgttggcgtccttccgtccagatggaccttgttgccgcccatgctgcacattattggttgcccaggagcgggcatacttgcgggccgccggcttccaatcggcaagaggaatccccttgctgtcccgccagccacgggcgctgaaatcatcaaaaaacgactctgcgcaccgtttcagttcgtctcccttgggagtcataagctgggccgccatgaaaagccgcacttcctccgcactccgtgggaactgttctacacccctgtttacagagcacggctccgactccgtatacgtcttcgtctccgtctccgtataagcggtggatttccgtgactcaccgttattcaccgtggattcccgtgaactaccgtgactcactgtattacacggtgaatcaccgtcaggaagcgggaacttgggcttactctgtctgcgctgcccgaaattgatgatctgcacataatccttgcccccgacacagtatgcccttacaagcccggcttcctccgtttcatggaggcagtcttgaatgtcctggttactgactttgtcaaggtgcaggggaaataagcgagtcctcaataccgttggtcgagcgtcaaacaggccgtagtcatccgccaccagcaaaagccgatggaagaaacactcggttcgccacgacaaagccgctaccttttccgaatcgagaaacccttctcgtatcatgcgtgatgttgccatatcaaaaaagcgtcagttgggggttgtagttgagccacaggcattcaatcttcttgccgccctgtgtgtcgtgggagaccttgcattctttccgccagccgtccagataggcggaataaagctcggaatcgtagccggataggacaaccttgcctttcaaggtctggaggaaaacaagaagccgttcatggtcctcttggtcgtactcatgcgcgtacctcacgcggttgccgagggtagattgcacatagggaggatccacgtaatgcagtgtatccggcgtatcgtaccgggacatgacctgcagagcatccatgttgttgatctcgatattccggttccggagttcggccgcacattctcgcactacggccggatattcccgccatgtctgcgggtagggtgttgttctcaatagaccattacgtttgaaccccggcttgtgaatacctccgccgtaggacatcatggagttgacggcaaagcggagagcatcttcgactggatcttccgcgatttcaaatgacctggcataggcttcttgtgcgtatggcgtcaattccaacagactggccagccgcgcggatttttccgtatcgcgcaaaacctcgaagaagttcaccacccggtcataaaggtcgttatagacctccatccatgcaggctgcttgttaagcaacacagccccggaacctccgaacggttcaacatagattttgtgaggcgggaaaaagctgataatccagggggcgattctgttcttgcctccaaggtatcgggccagagcccttttccgtggtgctctagtgttcataatacagccacctttccatgcccctgattctgcaatgtgtacaacaggggcgcttcttggttatcccacgccacaaggcaactcggagcgttgggctggttgccgggcgtttctccgtccgggcggcaaaagcggatgcggcctttccagaggaacagataccgggcacggtgcaacacacaccgctgaaaccagcgcgtgtccgacctcatgaaaatgagcgccagccctccgccctggtgcatactcatgcgctccatgaacgcttctgcttcattcccataaggagggttaagccatacgcgcccctcccatggcatcagaaggccgttatcctccacggtgtagttaacacgggcacaatcccacgggcgcacagtagcggcgcaggggtccacatcaaaatgccccagcagatccaatacgtagcgcggagtgagccagacgttcgtggttttctcggtttttggagtgttaaacgtgttcattctccctcctttctcggctcccagttattgggaatttcgtcgtcaatacctgtgcaacaaaaacaaggggaaccagatttcatgtcgcgatgaaggtgcatgcaatttttgcaatttcgctcctttaaagacatccacgccctgcacgcggcccgcttccgccatgtgtcgcggataagtgcatttaatccgcacatgttgcgttgcatatgccaaaaggaaagccccatatcgggcacatccgcgaaatactttttgcttctgtgggctttaagccagccgcgggagcgcccatactcaaaccaggctttctgctcaggcgtcattttcttcctccttggtaggggtccaatcacgacagcagttttttagatcgcttatgattccgtgggtgtagcaaaaataatcaccttcgttcatttcacagtttgcacacgattttttgaatgggaacctcctttcaaacacaatttttacctgccctgccttcgccaagtcatgcacacggtcaatccccgcacaatccagcgtcctgtcgtcaatccccatggccttgcaggctccgtccaggtacgctttgcagcgggcaaggcagttgtccgcgtccggcttgttgcccttgaagtaccagatcacccggtaatgcgtcggctgcatcttgtggcccttcagggcttcctgcgtcacggcaccggccattgttcgggcgcggcgcttggcagacgtcttcttgtagccggccacaatggccccccctctgcgtgagaggggccttggcgttgggcgacaggcagcgcggcgtatggggcaaggtaatggtcagcgtggtcatcatgccgcacctccccctatctccttcacggagccatcagagactttcacttctgcgcaccctgcaagcgtcttccgcagccaatccttggactcggctaccttggcgccagcatccgcggccttccgcacggaatgcaccagcttatccaggtcggtaatccccaccttgcagcaggacgtgaacgccggtgccgtgatgccatcggggaacaaaccgttgaggatttgaaaggccgccgcggcatccgtgatcgtaaacgccttcttgccgggggccagaaccagcccgggaatatccacttcggctttcagatccgccttcactttaccttccacggaagccgcccacttcttcgccagcttggcgaggtcataagcttcccgacgcttttcgggggtccactgctcccaggcagccgttaaatccccggacgtgacgttcaccagggccagagacactgccgggcaggaagactgggcccggcaataccggcaagccttctcgctgggtttcagcggagcgtgttcgtcctgcgccagcttgatgcaggtttggaaaaacgcccgtgcctgctccacgctctcgcgagtgtaccggcacacggcaggttccttccggctcgcataaggctgcaaaatgcaaacaaacacctcatctatcatttcaaattcaggcaacctgtagccacacttggaatctgccaccagcacggccagggcgctcaactgcaaattgcactcggcagccgccaccggcaggtggccaaacttgtaatcaatcaccagcgctctgcggccccagtaaactaccagatcaggcttcccggaaaacattccatccttttcaaaataccgcacttcgcgcatgaactgttctctcaacaaatccttgctgaaatccgacatttccaggtacttctcacacagggaaatttccgtctcgcggcaccaagccacggcttcggcgtcctccgggtcctccggcattgtcccttgctccatgtggacatgcagcatggttcccagggcggcatcatcgctctcttcgtccaccgggcacttcctttctgcattccagcttccggggcagaggaaaagcctctgcatcccgctggcgctgggcagcccctgccgttcgtcctcgatgatctctgtatcaaacataaggtcagtaagtcaggggttaatgttcaaaagtgccaaaggagggcgcatcctccggtacatccaggccgggaataccgtcttccggcgccggagcggttacaggcggcggggcctgcgtcgtcttgggggccgccttgggagcgggagcagatacaggagtcttcggcaggtcgggtttcctggcgggctggtcgtcatccgggaacacttccttcacccgcaccataccatcaacaatgccgttataaatattgcttaaatctcgcaattcatttacggtcatttcttcaagcttgtgccccaatttggtttcgagcagggcgcgcgtcactccataagctaaaaaattagcttccagggatcggagaatatcagccttatcacgcttaaatccactctcctgcgtattttttacggcttccagcgcttcatcagtcaaccagccgggaagtacctgcaagatgcaggcgcggatgcggcgagaagccatattggcgcacagttcgtaaacatcccgttcgttatcaagggcgacacgcagcatttttccagtctttttccctttggaatcagtctcattcttatcgcgggtatgaggtacagagaaagcaatttcccggcgaacattggtctccttgtcaaaacaataggcaagacattcggacacattgcagccgtttccatctgctcccttcgggtcccaatggcgggcaacttccttccatccggcttccgcattgccccatgcgccaatcagcgcttccgccaagcggatgctagggcccgtcacggtcgtatttccgcggggataggaataagtggcggattgcgccaacttcggttgagcacaagcctgtttcattctcaaggtcacttcagctaaatcccgcggaaactgcttggcgatccaaatggaagccagcacggaagtaacggctgcattgcttgtcatggcagccagggctccgccactggcgggagcctgaacggcaaaaggattgcctggtgcttgattggtgagttcgtttgttgtattcgtattcacgttattagtattctattgggttagttattgataacaggccggggaccagttggcgctggccccggccaactgaatcagtcttggcattcctcgcattcgcagcccgcgattccgagcatgtctgcaatgggatttaagccagctctcctgtgggcttccttaaaagcaagcttcactcccaaagaaatagtttcgggattgccggagaaacaaattccggaggcttccaagtagccacgagccgcaagccattccgtactttttgcgccggccatttccgtaacagctttgcaggtagaagtcctgctgttcacactttcacccttctcaatcttgatatgcagaatgacaggggtcttacactgattcacaagctcttccaggcggttatacgcttcttcaatcatatccacggtgacgggtgcttgttcggctactggatcgcagcagcatgcttcgtctgacgtgcagggccagggctgcgtattcttttcttcggtggtattatccattgtattggttttctattggttattgctttcctcgaacctcgaggggcgggacggttttgcgaagccgtcaaaagctttcgggcagtcgggcgtgaatccggaatgcggactcttccccgcctgtagttcgttgttgtccatttccacgatgagccacgctgtaccggcaatgagcaaaccacaggcaccgccagcaatcaggcggcatgtaccaatggccaaggctcgaagtaacgccttcatttgctcattcctccttctccatattcccgcaggagcgctcttcggaactgcttgccgtgcaccttcatcttgccctgcttgccccagtacaggacctcaatcacatgccccttgtccttcaactcatggacggtcttcttgatcacatcccggtcggaatcgtacaggagagcaagagtcttgcagtcgtaaaattctgtttcagggtaggtcatagtatttcattaggttacagttcgtgccagccgagtagcttgagcacatcaatcagttcgggttccaggtcagtcatggtgtccgtcagggttgtccgtcgtggcgtgatcccgttcgtactgcaccagggcgttttcgagggccgccactgcggtttcgtgctccgccatcagcttttcagcgtctgcgtggctcacggctacgtcgtccacgcggatgcagcggtcttcggtgtcgtattcgataatcattgttagaattgaatggttcctggttatcgggtacactcttgtgcatggattggcacccgttcattcagcaggctctcaaactgctcggcagtaaaaagctcgcagccatcatctgcgtaacctgggtacttctccacatcgcgactgcatgcccttctcaattcgtccagctcacggcattctgccaaaaaaacatgtacatgctggacctgatcgctttgtttagtactgcctgtctcattgtttcctccttcacaatggggtgcagatacctcaacccccatttgagcaagttctacctcaaaagaacggcagtaaaaaaaataaagcgcatcctcaaagctccggaaagcgatgactataaacttctcatggctcttcacaaaactcccaatacgcatcttaacgtctatgatccacttgttaaaaacctgcgttcctactgcgtcatctgcaggacaggggatgccctccttagtgacgatctcgtaacttacagaggccctttcgaccttactcactttgccaggcaatacatgaatacgcattgcaggcattaactgataaaaggtctccggattctcttctcggagcatcatcaggtctgttcttgtaagaggcctattcatgccgcgggcttcttgggttcggggttcttcttctgggctgagggaagcccgcgccttttgagaatgtcaaggaaggcgtcttccggagccttcccggattcaacgcactcttggatgagtgccttgcttgccgccttgtctgcggcaattttttcgatggggattttgatttcgatcatggctgtaaatcgtgtttctggtttctgtattacgaaaaaaaatgtatctgtcaacgatattattcaaaatattttgtataacgctcgcaaaaaggacttgcagattactaaaaatctcgtattgttaagggcatggacgccctaaagcaggagattcaggaatggctcaaagtgaccgggaaaagcaggaagtggttagcagatcagctttttgttgacaaacgaactgtggacgcatggctttctactgctggtaaaattcctcctgccaaagcggagttgattaaaaagctgatggagccattgtctccaggcgtgactggtgaatgccgtggtgccctggaccttgttctgaaactggacgctgaaacctacggtcaatttgctgcctgggctgcgcaaagcggatttgaacctacggcggacggtattgccaaatgggcggtgcaggtggctcacatggcaggggaacagggctcccggtctccgcgcaaaacacaggacgcagactaaggctctttcatagccaggtatgtggtggtgttgggttgttatcttcataacttggttttttattggattgcgaaaacattttttctctcatatctaacaaaagtcaataaatatttcccattggagaaaatatccaagaaaagccttgccaagatttcctgtatgcgaaaaatgcacgtatggatgacctcaaggctaaaatcagggtatttctgaaagacacccgcatgactcgggaagaactggcgcaccgctgtgctgtcaaaaaaggcatgatagacaaatggctgtctacagtccctatccccgctgacaagcaacggctgctggacaacctcattgatagccactacgccaaagtatacagggaaacagacgtccatatcagagtatctaatgagcgttaccggcttatccagattgaggcggccagacggggtctgacgacagaggaatggcttgatgctacgctgcatcttcacacgactatgccgtaccgtaggcaatagttttccactattaaaaagtccgctatggtggttgtttgttttcacattttctcagagttggtgaactcaaagtaataaaaagatgacttctaatcaagagggaaagttgttttttattacctttccccataatagattgacatttagtcataaaaatattactcttgtttcatatgaagcaagacctcgcagaagtgaaaagctggctcaagtcccaaaaaaaacattactcatggcttgccgaacaatgccacgtttcagaaggggcggtcaaaaactggttttctaagggacacattcccacagctaagttccttttcattcaacgcctaatgaatgaagtaagtgggagaaaccctatttcaggtatcacaattgatttcacggatgaagaatgggaagctatttctaagatactggcttccagtaagcaaaccttcatccagtttgttaatcaggctcttgcaaacgccgctcaggagtatttccaaaacgcaatcaaagaaaaagtggtctcccttaagcagttttccccggttgattcattgccagctgtggccaccataaataaccaaagttactctctgaacgtgattggcaatatcgccgccggcggcctacaggcaggagacactgttccctatgctatcaaatcaacgcggccgcttggtaaaaatgaatacatactgcgagtagaaggcaagagtatggaaccgatcatcatggacggctccctggttgtaatgcgtaagcacactataccgcccatccccaaggtcggaaccattgtcgaatattatgatgaacggggagtcactctcaaaaagctggtccggaaaaagaatccggaaacagggaagctggagtacaccctgcacccactcaatccggagtttggcgacatcgagccgatggacggcgggaagatatccggcgtgtacgtggagaccctcgacaagtgggaaaaggcgtaaataccgaaataatgataaacgtgttgcaatttgtatcttttatggtatattacacacctttacgttagattgcttcgccccttggccttcgggccagggggctttttttatgaaatggcattattgcgctttcttcaaatctaatagttgtacttgttgcttataatcttcccatatatcagccagtgcgtgatatgttgtttcatattcaggaataggtttcgcctgcataatccaatagcaataaggatagtctaaaaatttatctccaagtataactttaactacaaaaacgcctgcaacatctcgatgcttttcaaagaattttgtttcatctttccatagattgcgtggctttagagcgtctaaagctactgcgtcaagcatggctttcttcttttcatcagttttaatatgatattttatttctgtaactatttcacgaattgctttctccttgaaagtgcttccaaattggcgatatgcgccagactgaatatccagccatgcctgcccagggttattcttcacgacacttttaaaatgcaacataagagcttcagaaggagattccgtattgtacttttcttgcttaatacgcctccatacatcattaatacgtcttttgtgagcatttcgcactttgtttgaaaagtcattccaaacagcacgaaaaatttctttagagttattgaatataggagcttcctttccttggcccttccaataaagccatggatatttaatgttctctactccaaataaagcagtgaatacgcctattcctaaatcatattcttcgtcaggcgtggctggggcctggtagccttccgccttcaccagccttttggattcgtcatcggcgtcatcccccagggccaatgctgaaaataccttcaggcggctttcatcgggcctgaactccggaagcttccgagaactcggcgcctgtccccaatcctgcaaggaaggggaagcggtattctcctgtaaatggtcaagggaatcgggaagcaggttggaatgcttcgcatcctgcgccagtgggaaaaagtctgtcaaaggacgatctattccgtgggataaagtagtaaaaagtatggaaaaagtgtagagcaaagcgcgcatggtaaactctacatacaccgtacactccttaatattcaatcttattccgccaacttgaacccaggtttggataaattcgccactccagccacggacagtagccaggaggccacggaatcaaccgccttgtttcggctcccggtgcccgctccggccacataggcggctgccttggcatccagcagaatcaattccgcccaatcggcaaacgtcatcttcttgtctccggtgacagtcttccacgtattcctagccgcccggtgaatcgcggaataatcaatcactccggatgcggtgcccacgtaaatgcgctggccagtcgcctgcttgtagccaaactccaccgccgcgcccagcatcggcacgccaccaatcatggcaacgggagcccccagcatggcaccaaaccatcctccgttcttctcccactcgtcctcgtcatccagcagggcatgccacagggcaatcaccgtctgttcggcaacggacatcacaccatatagagcaagagcctgcccccaattcccggcgctcacatgggacacgatcatcccgaccttattcagcacctcggaactcatgaaacaggccatcttcgcaaacaggctggtggaagtccccagcatgctcttctggctttgcgtcagcggctgggccaccagctccagcgccctggtcacgctctgcatgcacaaggcgtgcatctcttcctccgtcatcggggagccggtccttctaccggcctcctccagctcggcccactttgcattatacagggcagccatggacacggcattgctccacacgtccatcttctcaatagccctcatgccggccatggaaaaccgaatcgctccggtgtaattctggtcggaagcataccccatcaactggctcaccagctccgcctgcgcgtcattggatctcgcccggaaagcctccgtcttcatcatctcaaacacacccatgcgtccggtcatggacatcgtctgccccagatgcagcaggaaactacccatgcccacctccccggcaaacatcccgtgcatcaggccgcttgtctgcttgatcatcgtcagcacgttccaggccagaagagccaccgccttggcgctctggaagcggctcgtcgcctgggccccggccagcagggcacccccctccatcactccggccccgtcgatcacgtccagccagtgccgcagcgaatcaatcccgtggcgtcccatatgctccttcaaggacgctgccgcctccttgtccgccaggatgccgcgccagcgggaagtaatatccgccgtgcaaatataattctccacctcggcgctcgctgcctggaacacggcctcgcaatccatattccaggccaggtgtaaattgtgcttccgcctgggaatcagcatcccgtacttcgccccgccggccacggcattcgtctgctccccgaaggacgccttcgtatcaagcttgtggtccgcccggaacacggcccggaaataattctccaccgcggggaagggaaccccctcccgctcctcatacacgcgggccagcagctttccctgccggttcatcagctcccgcagaccatagccgaacgccagcccttcggcgccaacaaactcgcgcaggcgggcaacctccgcttctccaatgccttcattccgcatcgtctccacgtactcggcctgctcataaagtaaaatggcatacatcgcctgggcacgggaaaccttcaacgtctctcccttcctgcccggacggactacctccgccttcgccgtaatattcttccttctcctggcccgtccgtctccggccttcaccagttcgtccagctcggcaagctgtcggcgcatctccggaataagcgcttccggcacggatgccttatcgtcggaaagcccccggtcattgtactccttcttgatcgccctgcggcgctcctccctctcttcaaaagacagaccaacccactcgcgggcctcggcgatcctcaccgtgcgctccaccttcaccagcggattcaacaccacgccggaatccccggtcttcttgaaatcagaaagaactcttgccacgtccctggtgcgttgaacgccaaaacaccgcttgaccagggccgtcacctcccggtcccgggtatgcttcatattcctcaacgccacatttgcttcggcaatcgcagtaacctcggcatgcgccagagcgcgcagggcgggaatcttcctccatccattcaacatctgggaataggactgcaagccgtacttcaggtacttggctaccttcgtcttcgtggacgccttcgcatcctcttccgcgtcacgccctccctggggcgtggcctgcccaagcccttccacaatcttctcggccttgaacttcgtccgccgcctctcctcgtccagcctggcggaccaggctgtccgccccgtcgtaataaacagggcaagggcgcgcacgcaggcgcgcgtctgctccagtcccatcccggccaaatgcccgaacgtgtgccaatccttcaattccagctcggccgcatcccgttcctcttcggtggactggttgctggaaagcacgccctccagctccagcatccgcttctccttcgcctcctggtccgtattcatcatggcgactatcccgtgcagatgcctgtaatcctccgcgctcaacttgcccttgttaaacttcccgctggccttcttcgtcggctgcacggccttgatgcgggcaaccatctccgtccgcatctggtcgatggcataccggtccgcctgttccagcgtgcgggccagcagcttgtcgatcacggcatccatgcgctcgctggtatcgtccatcagcgtctccttcttcagctcatcggaaagccatgtctgtccgtcctccagacgggtggcaagattctcggcggctttcatgtagggataaaggccgaacctgtacccctccggcaacgtcttgtaaatggacgccaccacggccatcaccttcccgaaagcctccgctccgtcgcctggcttcaacttgttggacgcacaaacccggcgccatgtctccagtgcttttgccgtctggctgcacagcacctccagacggttcttccgcgcttcccgttccagcgtcacccaaatactctcttctgtagcaagagagaaagttgcctccggatctgtgtaacccttccacgcgccacccgtactttcatccgcaaactccgtgatcttgatgtcattctcgtcaaaaatcacatagttatacgtctgttgcaactttccgcgggatagactgtctgcgtatttaatccctttgattccggcctccagcaaagcaagactcgcctcctttttagcatcctgtttagtatcatcccctccatcccagaaagcgtcaaccagcgcgacataaatacccttgccgcttacatcctcgccacgggcaccggccacatttctggcatattcaacggcgtacctcaccgcctccaccggagaggaactcaacaactcttcaatgtcgcgttccatgtactcccagcccagcaaactaccctcatcaacattcagttctactcggtagttggacggactgccagcagcaacttctatttcatccagatggtcaaccaaaaactgacaaactacattttctgcatcgttcaggtttttcgtatcggggtaatttttcgtataattctcattaacgcgtatatcctccctcaatttatccttaatggcatctatcttcttcttgtctcctctggcatcagataaatcgccaagaacggcatacaccgtatctagtgcactatccatagctacacgactgatattctccggaagtttgattctatcgcgtaatcctcgtgccatatcatccacgttggaagcctccaaatccttgaacctccatgtcgccacatcctgcgcaaactggttcatgtaggctttatttacctcctgatgctctgcaaaatacagcccccatccatacgcctgtgctccctcgcctctccccatttcctccgtggtgaacttccgaaaagaataaggggaggcatgcagggcggtaatggaaaacgtcacacccggttctgtaataactgcatttcctgcttccagatgcccatcccggaacagaccctgctcctgcgcattcgcgatagagaaagacacaatcgcctcaccaggatattccagtgtttcattgaacggctttgactccctgcgttctccgtcccacaggatacgcctctgcacattccgactctcaatctcaccagcggaacgcgcatagccatcaaggctcccactctcatccaggctactccctctggcaaagccttcaatatcctgaatggcgtgctgaacctcatgcaaaagagtggaaagctgcgtccctatcggcccgatgtgggccagattgatcgcaatggagcgttcttcggaatcataataaccacgggctgaatcctttctattcttgtacgccaaaatatacatcttccgcaaagatggataagcctcatacagctcatcaaaattcagtacatcctcaaggcgcccgcgccatacgggattcttcctgtaccccattcccttggaccactcatcaaacatgctcaagaacgaaaaaccctccggagtcttcaagcttgcctgactcgcatcaatctccgcccgcatcttgccgtcgtcacgcccttcaaaagcacggttggtgtacttgatccatgtcttggcattcgaaccaaccacggaaaacgttgccggaacaatggcgccgtcgtcaaaccggcattccacttcattcacgttgacaaccttggccccttgtggtaaggaagaaacatctcccccgccagcggattgggacggcagagcggccttgcttgctgatcctggacctaggcgcgcggtgccgctattcgcgtttgcaggttgtcgctctgcaagggggagcttctttccgagtggcttcttgccctgccgcactggataagccgagacaatggaataaaacccgtccttccggtccaattgcagtagcatccatgaagaaggctgcctgcccttgaccagtagctcacgaccgggcgccacctcgtaaagctcgctcacattcgtcagaatggaactgatatagcgttccggggaacggtcttgccagaaaagaaaacccgcgggaagccaggatatgggtcagtccataaccgcggtgttccccaacatcggaccccaccagcagccgcaccggcatggcgggctgccccttacgacgcggaaccacaaaccaatcaggacttccgtcttcccgggtgacgaacgtctccggccccaggacagatccggaactgtccatggcaaccacggaaaacgtcgccccggaaacgggcacatgctcgaacggattcacttcactcgtgccgtcccaggcaagggcgcggtcatgaaggcgcagcgccgggtcatgggattgccatgcccccttggctctttccaaatcatgaatggccgcattcaagtctgcgtccgtctccagacggatgcccatcctgcccgccaaatccttccgccggctgattcctctggacttcttcaggagggacaggcgttcggtaatcagggcaatcccccgggccgtaaagcgggctaccttctcgcaatcctcctgccaggacgtatcgttgccgaatagatcaaacgcctcaccctcccgggacttctccgcagccacccggtcagcctccttcacataggctgccacgtaatcccacgacttccccttctcgcgcaactgcatggcaagcatctgccccgcctccattccggacaagtggcataccttccatgcttcgttatccgtaatcaccccgtttttcaggcgggtaaacacttcatctccggcgagggtggcaatatcccagcccatcacattggccgacccggggcgcaaatacccctgcgcctccatctcctcccggctcattccggaattcctgacaaaaaaggccacttccagcgcggacgcctggccgtccagcatattctggccgacgtcgtgcatctttgcccaggtggcgtcatgcgtctcatcttcctgatacacataggccggaataaactccaccccgtcgcgtgcggccagatcaaaccggtgccgtccggtaatcacatgcagggctccatccctgcgccgccagacggaaatgggctgggcatcttcccggaaccgtccctggagttcgcgccccttcacggctccgcgttcattatgatctccctgcttgaactgttccacgtccggagccagggccagggaatccacccgcacctgggcaaacacgcaatccggcgccacccgcacaaacgcatggtcgcggaacccagcgccagcctcttcatcgtgttcggcctcttctcccaccccttctagggcgcctccggcatcctccaccagtggagcgggggatgctggattcccggtaatgccagtcacgggatccgttcccgcctcctcttccgcggtatcttccacatcctccgcggcatccatctgcgccatggactcttccagcgcctccagctcacccagcgtcatcgtgaaatcccccggagccctgcgggaagcaaggtccgcgtgcaccatctccacatccagcccctgcgcggcatccatccgcgcctggcggaaaacgctctccgtactcacgcccacagcttttagagcgtctgccaaacctccatgttcttccatgaacttctttccctcgtctgtagctgcaaactcattccattgttctccaacgcgcatgatgcgggcggaatcctccagatttttcagagcgaactctgcggtgtccttcacccactggggcacgggcaggttctcaatatccgccagagaggaagacagggacaggctggaaaaactctccaccacgtccgaggcatcatgcgcaggaccttcatacgtccccagactcacgccataccttcccagcacggcgtccgccgcctgcaaatgctcccacaaatcctgccagtccttcccggtcaggttcatgtaatggaccagggcggactcctgcacatcctccatcacgttggctgtccgggcatggcctccggcgtaaagcagcagggaacttcccgggtcggccgccatcgtgaaccggtgggcggcgctggccgccgtcgtgccgctcctgatctcctcggacctttccctcgttatctcaccggaacgcaccccctgctcaagacgcctctcaaaagccgccgccaaatcggcaatagaaccaagctgtactttccccatcacttcggcatccgtcctgcttctggcctcctggagggacacgccctcttcccggacaatcgcgtcaatccgtgcttgggcacgggcggctacatccatgaacccgggaacggtcatccctccggtttcggccgccgctcttcggtactccgcaggcgcttcctcggaaagcatatccagcgtctcaataaaatccatcttcccggcttctgaaacgacggcattcccaagcacggcatcctgcatcatgcgaaccccattcagataggctccttgcagcactacttgaacaagagcatccgtctgctcctcgctcatctccacggtcctgtcttcctccatctccacgccgttcactacagcgccctcccgcaagctcacttcgtacctgtccgttccctccagcttgcggatgcggccaatgtgggccttctccagcaccttgtccagagcgccggacatctggtacagccgggcctcctgccggtccgccagctcggcgccggccttctgcgcccgttcggcggctccttcgggatccttcaaaatatcagtctcgaaataacgttgggccagagccgccttgtgctccacggtggaaaaagacgccatctcttcggcgtgcttcttcgtgtacccggccagctgggcctgctgggcatccgtcacgaacgccgccacctcctgcttcatcctcggagcgtggccggcggccatggccgccacaaacaacgcgcacccgccggactgctccacatcccccattgcctgaagcacgggccccaccacctcgaaatccttcggcttcacctccattcccgtcatcccggacaacttccgggccgtccactcgaacacctctccagccaggggttccgctcccatttcttccacgtaggcaaatgccggggcagaaagcatcttgccggttctcgtcccggcaaaaaacgtgcgccccggtaccttcgcggccagtcttgcaagagtgccggtgcccgtcttggtcagcagcttgttgatggcgcccatgcgcccaaacacggaaaacaccccgaaccctttttcttccaccgtattccgcagtccgttaatagtcacatccaccagggaatccccgttgcgggcggcggtattcccggcatgccccatatctccggccatggccagggcccagcctccgggagccatataggaaaggctctgcccggtaatattcccggatccattgatcgccttgacataccaggacgcatcgggactcgtgcctcgcatccgctggccgaactcgtgcatgatgtcctgcatcgtattcagcgccccgcgtctttgctcgtaacggtcgtagagctgcctttgcccatcaaacgtccccttcatgcccagtgcggatgccacggtgttggaatacaggttctccatgccttccatgcccggcgcatcacgcacggcttggaccgttttgatgcccaggctttccacgccgcgtactgtatcggcaaagctcccgtacaaattgcgccagaaagaagtggagtctgtttggctctcctgaaccttccggtcaaccgcggtcatcagcagcctcaacgcctgctggtccagcacctcatttccgttgacattcaccgtcagcagatcggccatgtccagagcgtcggaacgccagacatcctcaaacccgcgcctctcgacaaaagcatacgcccgccgcgcccgcatgatggaatcggcagcctcctgcggcctctcggcatacttcaacaaatcagcaggacacgcatcccagttgccttccttcccggctacgcaatccaccatccggcgggaaatttcttcctgttcctgctggactcttttcacccgttccttgtaggcggcatcctccacgcgtgttctctcggaaaaatcctgccacacagcgcggtgggcaccccccatatccttgaaccgcggcgcttccttgccttgccgggcccaatacaaatacgggtcggcggcttggtccagaccaaacagcgaaacgcacacatccagccccaggcatgcttcttcgtccggcgtggccggggcttggtagccttccgccttcaccagccttttggattcgtcatcggcgtcatcccccagggccaatgctgaaaataccttcaggcggctttcatcgggcctgaactccggaagcttccgagaactcggcgcctgtccccaatcctgcaaggaaggggaagcggtattctcctgtaaatggtcaagggaatcgggaagcaggttggaatgcttcgcatcctgcgccagtgggaaaaagtctgtttcaaacatagtaattagttaagctttaagttggaaataatattcggaaactcccttcacccagtgggaattcagtcctctggggtcattggacgctccgggcggggcgtacttcttgccgatggcggcaatcgtcgtcagcccctggcccagataattgcgggcgagctgccgggccatgtagtcaataccggcctcgaccgtctcaaatgaccgcggacctccaccgttcggactcacgcccatggcgtttttcttattccggaaagcggagctggttccgttgcccgtttcatggatggcaatagccatcagcaaatcagggtccacgccgtacttctccccggcccgccggaaggcggactcgtactgctgaagagccggggaaagaacctgggcggccttctgcggggaggaaacgggctggttcagcacatcggccgccccctgctgcggagcataaagactctcctggtcctcgtgaagctgtcgggcatacgcggtggcatcctccggagaatcgaacacgcccaggtgtttacccgtcttcttgaactgcttcacggcatcgtcttcggaaagaaccttgccgtcctcggaaacggtaggaatcaggtactccttcccgtccatctccacggaaatggaacgcactgtgctgatggagccgtcggcatggcggacgacggggcgggcgctcaaatcaatattgccgggctcgatcatgccgggcacctcttcgggggcgaaacggacggtcgcattccccttgtctcctgcgagcatgatcaggcggttgccgtactcgtcgccggaaagctcaattcccctgttggggccttcgtaaaaccctaccaccggaacctcattataggctttggactggtccatggtggctttcaggcaggggcggcttccatacttctggacaagcttctggtacatctccctgggcacataggccccggcgcgcctgccagccacaaaggacatgggcacggccaggggagcgctgtctttcccgacctccacctgcggcgtgtagggaacctgattctcctggtagtccttccactccttgttcttccggtcgatgaaatcctgccctgaatccggttccctctctctggtatctcctacctgtgcttcgctgtcgaaagcgcgtgaaatctccctggacttatctacgatactcaaattcttctgctgatcgtattcgttcagatccttggccttctcggcggcaagcaggaaaatctgcatccggtcatcatgaatgctcgcttcaggattccgttctcgccaatatgccatctggacgcggacatgttcctcaatctggctttccaccaaatttctggcagcctccttctcctgaatcttctttcggtcgcctttcttgtacgcatcctcaacagatgcggacctgttcgggatatacgccccgtccggaatatggcgcagcaccagcccgatgtcattcctgcgggctcccttggcggcatccagccgggaatccagcttatccatcaccacggcgcggatgtattcctcatttccatcataagcgccaagcttggaccacttctgtatggttcgggtggcaatctgtcttgcctcatcccggtccttggggacaggcagtttatccagctccatgctgaaagctccccgtatctccaccttgtcctgttccgtgatccggcctccgttcttttgagcattgcgggcccacttccacatctgttcggtggctccgttgggaagctgttttttcagggcgtcaatattcttctcctgaatattgcggcggtcctctgcggttagaggggcgggtgtagctatatcggccagccggcggcgtatctcgcgtttggcccggtccaggtcaagaggattcaggtcattgtagagccccttgttgacggaagacgctgcatgaacagggtcggcggcaacgctggaaaacaaggccgtctttaaattctcctgttgcttttcatatctgaccttgctccctttaacacgcagaagttctgctttttcaggggaaatggtgttggagtgctctgcatttgaaatggaagactcatacccaccccaatcttccttctcttcggccagcttcaaattggtatcaaaagcctgcctggcaacactcaactggtgcttggcagccagcccccaatagcgttccggcagactcgccttcacggactccatcataccccgtgccttgatggcgctctccgggttgaaaaacgtcccgcccaaattctcaatccgctgtccgaacttgtaagccagatcatccagacgtcccttgataatggagccatccttgtcaaaaacactatccttggtccctggagcgtaggaaagcaacttggaaaactcggcgtcggactcgtcccgtatgcggcgtagctctacctcctgccgttgcatctctccgaaatcggaaatcctggaaaacgcctcggcgcttccctgcaagccctgttcggccttgtggatggaggcgcccagcatttgaccctggtccccgttggcggcattagccgcagttccggggttcgctttggccgcctgcagggacggccctccgtataaaggaatctctttcatcgtttcgtgttattggtaagttgatcaatgggaaaaacatgcaccttcgggccgcgcaaaaaacgctgccaggccacatgcgtgaaccctctcccggcaaactgccgagccaggcgggccagttcccgcggcttcccggcggcccaccatacaaacaggcacccttccggaagtggaggaacctcttcgggagggaaactcaactcttccagctggtcggcaggcagggccaggcacacttcatccggggaaacaaacgccagccccagggaagcgcaatctttcacatccgtccacaaatcccggcccacctccgcataagcggtcacggtcgcatcaaaagcattcataatcccatgctccggtaaggattccacttctgtgtatagttataaaaactgaaatcactcttggccggactcgccgcccaggcccctagctccatcatgcccaggcgcgggtctgccgtggaaccgggaaacacgctgccggccagccctcccaggttaaacccggcaaaagctccctgcgcggctgtcgtggaaccgaacgctcccatcccggcgccaatgcctccggccagcgcgcccaacccctgaatccccgtggaaaccagggctccattcgccgcggacctgtaagccgccgcctggttctgcgcactcaccaacgtggcgtctccctcccagcgctgcatggccgcctcatggcgcttgttctggtcattgatagccgcccccagggacatatcggaaatctgtttttccaaaatctctgcggtcgtaagctccgcctgcagtccgcttccctccgtcgtcaggccggacgccccgcgggcggcgcgcaccgaagcagtggcggccgtctggttgcgcctggccgtagccatattctcggcagtgagacgcagagcggaagcggactcggcttccgtattggctgcgttcacgtaagcggcatccctcgccgcacgtccctgcgccagggcgctcttcgcgttgcccttattcgtcgcgtatgaaccaatgcttcccataaccctataaaatggaacggtttaaaatatccatcaacggatgctggtcattgcttccccgctggctcacgtcgtggtggagggcgtcggcaatgtagcgcctgtacaaatccaggaacacgcccacattctgcggcttgcccgtcaccgtcgtagccatcttggcggccagcaggcacttcacggcctccacaaacattggcgcattgtccggcagcgtctccgccagggccaaatcattggacaaataccacacatagaggagagaatggctctcctcgcaaattaccgtgcggccggacatgcgccaatgcctggcatccaccttcaacagcttcaggcaatcctccggcactgtaaaccgtccatctttctccgggcattccaatacggtttccttcgtggcaaacgaccacggcccgtaagacaccgcctccagcatcacggagggaaaccacaaatcgcacgttctggccgcaggagaatcaagcacatactcctgttcccccagcagggaaaggcactgtgaaaaaaacgtcagcttgtccatccctcaaaaatcgcatgagggcgcacttcgttcaagttgccgagtgtcactactttttgccggaggtgatttacaggcatctcatgcgcgcgtcatacacccgagtagaatagttgacaaaaactaattggtatgtataaataaatgtgcgtccgggaagagtcggttcgactcgccgcctgcttaggcaggccaccctggtcgctttttttttgtaaaattacagtccttaaaaaatctctcagaacaatgttcctcttttacgttgatgaatccggaacaccggaaataccgggagtttccgatcattttgtattggctgccatcggcattccggtggataaatggacaaaatgtgataagcaaatcaatcaactaaagaccagttacagcctttcggaagctgagatccatgtcgggtggatggttcgccactaccaggagcaggaggaaatagcggattttgagaaaatgacaccggcagaaagaagagaagctgtcacagttatgcgtgaaaaaatcattcaaaaacgcaaatctgaaggaaaggactacaagcaatataaaaagaactattctcaaacggaatcctatatacaccttacttactatgagcgacagaggtttcttcaggaattatcctgcatggttgggaaatggtcgtctgccagaatatttgctgaaataattgataaaaacgaatacactccgagaaagcccgccctgactcctaaaacacagtcatttgagcaaatagttattcgtatagaaaaatacctgaaaagcatctcaaacagggacgacggaaggggtaaacgtcgtggactcattatccatgacaacaacccaagtgtggctcagcaacacacgaaaaacatgaattcctaccataaaaaaggaaccttcctggcaggagttcatcatatcatagaaacacctctctttgtcgacagcaccctgacaggtatggtgcaaatcgctgacttgtgtgcttatgcgttaaaacgatacgcagaaactggagaagacgctcttctaaagcctttattatccagaatagatcgtgttggttcggatttggttggagtaaggcactacacgagcagaaaatactgtaaatgcttcttttgtaaaccagagcgattgcctaaaagcgtatttcgaaccagaaagaagtaacccttctctcaataaagcattcccctcagagcatcagggcgtttatgcggcctcctcaccttctccgccaccccggcatgtccggaaaccatcccgtggctcaccgcttcggcaaacgtcctggctgcatccgcgccgtgggagcaggcgtcatgcaacggcatctccctcacgcacccgttggaacccggcggcaggctgcggtaatactccagggaacctatcccggaaggatacttctgcccgtcgatctccgggcgccggctgcaccgctcgtggaacgtgcagtagcgcagcatattgcgcagggcgttaatcccggtccatatatcggacgtacgcggcacgattgccgtgcggaaccccgccttctgcagcacggcatcaaaggaagtcttggaataatcccgcctggacgcatcatggggaagcaggtgcagggtaatggggccgtactccttctccctcatccgtatctgccccacgtaataatcaatcgcctggttattcccggcaatgtaatccagcacgtaatacttcccgccaatcacctgccagagccaaatagccatgaaatcgctcaatcccaaatcccaggaagcataaatcggggccacatcatccgcttcaaactcggcggctaccctcccctcggcccggagggtggaaatccacctgccgtaaatggcgccctccacggaagtctgaagggcttcttccggaaccgtcggaaactcctgcttcacctccggcccgttggccctgtactgggtggcataccaagccttctgcccctcggtcaactcaatgccgtagcgcttctttaaatcggcaaaatactccctcaaaaaatcgtccagcctcggctccaccccgtccagggaatactcccgatgctggagccaggagaaaaagaaaaacctgaaatccaggctggaaagaggcttgcccaccacctccatggcctgttccatcaactggtaggccagtccagccttgccaccctcgtgggtggactccatcaccaccacgctattcttcccgacggcattcaaagcccctgtccgaatcttcttcgcccgggccggatcgtgcagggccgtataggaaaactcggaaatgtgaaggaactggagggtggaaccgcgcaggttcgtacccacatccacggagccgttcgtagaccaggccatgcgctgggtccggctctccaccagcgggcagctctccttgatcttctttcccaaggcagccaatgcccggtcttccatcgtcggattatccggcaaataatccagatgctcatacgcgaaagcgatcttgcgcagctttgcctgtccatccggaagcgtcttgtcgataatcccgcaatgctggttctttccgaacaggcaaaggtccagcatgtaaatggcgcaaaacgtggaaatccccagctggcgcaccttcaggatagtattgcgataccagaggttattgaaaagctcctcctgggcccagttcgggcggaagcgcaccatctgcccgtccttgtcctcaatccagtaaagatgattcagcctccaccaccggtcggccagcagctccttccagtcaggtcttgtctcaacaggctctgtcattgcgtatcaatagctaaaaactcaagggggcggtccccggaaacccggatgccaaactgcacgccgcgccgccacagggaagcggggagcaattcatgccatccgcgttccatcgtcctggtctttcccagccgatcccaggtggagccgtcattggaaacctcaattcccgccggcgccgtgtcggaagcaaaaaatacgcgcacggctgcagcctgcctgtccttgcccatggactccactacatccagcgcgttcgtcaccacggtagaagtgtaatcccagctccctgcatccacgaacgggccgtccgggtcaaacacctcaataaaccggccgtcctcgcgttccgcaatgacgaacagcaaatcctccccggtcccgttgggcagcaccacggcgttggacatcctgccttcggtcctgtgccggtgccaggcatgaacctgatgcatggaattgtaggtcatcaaggccatcgtgccgtccgccagagtcatcacggcacgcggatggggctttctcatgaaatctccggaagtaacgccgccgccctgggccagcacatgatcggcaaacacggtcaggtcacgggaaacgtacccgtcggactcgtaatcgtacccgtactggtacacgcggccaccaccgcgctcaatatacagcaccttgtcagtcgccatcatggccggaacgtcggaggatcccacaaagccgtggttgtccgcccgcgcgttggtggcagtcatcacgccctgaccaccggaaacagcccactcggcatccgctgttcccagcaacaggcggctggactgggccatcagccagcaaatccggttctgcgtcgtcgtggaaagcgtgagagccaaggcgctgtcatcctgtttgcccacctcgaaattgttaaggtcatcggtcttgctcaaccacaccgtctgcggctgggcctgtgtggcagccaggacaaggcgctgttggaatacatccaccagagaagggaacccgtagacgtcccggaacgcggcaaaactccacatcagggactccccggatggggggacgccctccggaatcgtggacacattgtcccacaaggaatactccgcggaggccgtcaagtccgttacctctccctccaagtgtcctacacaagcaggaatcgctgcggaagccgccggccactggatgacgctggaaaacgcattgacaaaggggaggtaaaccaggtaaaagccatcctccggaaccgtccaggaaccggcaagggtcgtgtgcgtggaaatgctgtgagaaccgctgttgggggtccaacttaaatacttaccgaccatggcggcctgctcgttgcgctggccggcgtacatccagatgtaccctttcaatttgacgaccgtccctgccggcaagaaccgggtcacccatcgggagccggtctgctggttggctccgatggaaaaattctcggcggccacatcccactcgacacggacagtctgccctttgaccagatcgtccgttgtcagccctttgggcttgatgaccaggttatctccatccacgaggacagaaccttggaacgtccagcggccctgatccatcaccagcgccttgatggagggcaccccggacttggaaaaatgagccttggcggtaggctccaggggcagagaaaagcgcagcacgtcgcaggtggacacggaagccggagcgggcgcatcctcctggacctccggcttgacgacgccggaagccacgccggaaagctcggcctggcactcggcagcctccagggtgctcccattattgagggtgatccgaaatgtataaaacccgctggaaggcgtggtataaacatctgtcttgctctcccatagcgttgtgtactgcacatccgcagcggaataagccgtcagcttgaccaccgcgccgcgtcccctgttgtagatgtccgcccccaggttcacgtcaaattttgctcctgcaggaaggtaaaccgtccgcatcccgcgggcgtccagggcaatgcgcccggtcttgcgtggctccgtccacccaaagcggaccgtctgcccgtcggcgagatcatccgcaggaatccccctgggcgtcacatcaatgccggccttgccaagcgtcagcacggcggaagctcccgtcatctccacatcatccacccacacgcggcttgccttgatggaggatgccgtacttgtcaggtaatgccgcagcgtcggagttgccggaatcgtgaaccgctgcacggtggccggacgggcgccggaacgcagctgcagcaccacgtccttgcggtaggcgtccaccaccagcttattgccgcaggcgtcagcggggaacccctggctggggtcggaagcgttggaaagctgggactcatagagcatcaggcgcaggtagcattcttcgcccgcctcgtccccggtaatctgtaaattggatgccgctccaatcctggaagtggaggaaccgagcagctgccagtcctcttccggatagcggcgctctatagcgtaggttccgtaccattctttattgcaccagaacttccacgtgcccttgcaggtaatcgtgttggaatggcaaatgacacccttgtggaaatggtccgggtaatccgccggagaggtgaggccgtccacgtagtgggttgccccgttgaaatccttgtcgcatgtccaccaggaccagtaactcccctcattcacgcacagcttcttgccggcggtgaaggcactggccgtggtaaaagccttggcaatcacccagccctggcggatgaccgcccctgtactgtacccggtctgctggggcaccgtcacctggatgcgcatcacgtccccttcgttggtgacggcatcgggatcctcggaatgatcaccgaaagaaatcctgtagcatccgtcatccagcgtcagccgaaccgggaaatcccggtactcctcataccgccaggggcgggccttaaactcatagggagccagggaaaacgtgccgtcgtcatcccgcttgagaaccatgagctcgtgtgagggacaagccagaaacagcatgctgttgacctgcttgtgccgcagagatgcaatgtcggccgccgtccaaacggaaggaagggaagccaccacatcgccatcgacggacaagacgcggagcagggctggacttacctcgacaagataacgatcactggcggaatacacgtaggacaccatcatggacccttccagcgcggccatcaccctcttcatgccgtgccggcgggaaactccacccgtttgggagacatccacattctccaataccgacgccccccgatgatatacatccaaatccggacgcgcggcaatcccaggcgaaacctcgcccccgttgaaggaaatcctcttcatttgccttccaatataaatggagggtgaaagctggcgcaagttgccgagtgtcactactttttgccggggagagcgaaaaagggccgcccccttgcagggacggccctatggacaaaccaacgaggaagaattactgaatgccgtaggcaatggcaaagacaagcttcttgccggcggttactgccggcgtgccgcccaccttcgcataaagcatcgtcgtggaatccatcggcttgccggaaaccgccagggaacccttcgtcagctggtaggttccggccgcggttacggtcagggaggcggaataagcatccgccatgtcctgcgtgcctacggtcagctgcagcgtccccacaccttcggaaataatgtgggaaagctgggggagcacgcgggcgccgcagggaacattgcagatggcgatcaggtcatcggccgccacggatgcgggcatcgtgaattccgccgtagccacatggaccccggctctggtatggatggccgcaagctgcggaactgttggcagaccgatgcggtccgccagggcgagctgtttttcagcaatggttgtttgatacgttgccatgatgatttaatgtaggattgaatgttttaaacaaggggcttgcacttgatctgcaggaaggcttcttcgcgcatgcgagtggaccccatgatggtcttgaggccgatctgaatggtatcttccttgtcggttcgcttctccaccgtcaccttgttctgcttccaggagccgaaatacagggaattcttcatccacatggggcagatgatgtttccttcctcgtcaatcggcagattgggagcgatgacgaactgaatgcccatgatggggtccagggtgccgttcgttttacgcagggatgcaaagccgaaatcggtcttctgcaggcgctcgtcattgatcagggcttcacgcatgcggggagtgatggcgcagcacacctggtcgccataggcgttggaagcgtcgtcgaggataccgttctcctgcaggagcgtaatgccccggttgagcttttcaatcgtcatcgggcattccttggccgtgcttccggtgtggttgacaggcacgacattttcagccagcagttccagcttgtccatgccgtcgttgccggcaaacgccgttccgaaaatgccgcccttggagggaacgtaaaggccgccctgctttttcaggccgaacagtacgtcgtccatcttgcgggccgcggcatacttgagggcattgatggtttgggtgacgggggcatccagaccatgcaggaaaatatcgtcgtcttcatcgtagcccaggtgcttggagaagctcaccggaagcatccgacgcttgaagtagtcaagttcatccagaacaatgtcctgcatgcgcccctgcttctcgtccaattccgtggtgcccacgaagctgaactcctgaagcttgcccgttagaccggacttgataacgcagaagcgttccaggcgggaagtggcctgctggatttgctcctgccactggttgtcgtaggtctcctgataaagatcggagatgggaagggtgtaattatttggcatgtctccatcaggaggcatggacaggacttttgcaagttgccgagtgtcaattcagttgtagatttgacaattcgcgtaagggttattgaaatcgaagcatcccggcaggcatcttttttgtcatacaggcattacagaagtgttacagattgacgtaaatatctgattgtaatttatcacaaacccatcatccgctccattttttgccttcggggttattgcaaacccctcattttacaaggcctcccttggtagcagattgtgtgatattcagtcctattacatggttttgttatgcactatgctatacatcgacttttcggtgcatagcagattcaaaaccgctaacaccacaacattatggctggaattatcaaaagaaaagacacttggtacgcctgtttccgagttggaggcaaactcaaggttcgtaccaccggcatcaagatcactcccttggttactccaggcaaattgaagaacgccgccatgaaagaagctgaacttcaggcgcgcatcattgcagaagagctggagaaggaagcaaaaggggcacttctaaatgccgatgttatcgtttcactcgccgggaacaaggccaagtccgtcctgcgaaacaaaaaatacatgcccagcgtcaaggatcatctgcatcaatggctggcgaaccgtcccaaccgacgcgccaatcttcgttacgggaaggctatccggtgttttctcgactttctgggacccaaacaggaaatgcccctggacacggtgacggaggcccaggcgcaaaggttcatggaaaaatatttggaattgctgagttccaagacggtaagcatttacctatacggtttgaatgcggcctttcaacaggcagtcaacgaacggctttttccgtacaatcctttcaagggggtgcgtcccagcaagatcaaccgtgccgatgctaccgaaaggcgcgctttcacagtcgaggaagctcaacgattgaccgaaatcctgccgggagaatggcccgacatgatacgcgtctgcctttatacgggaggccagcgtttgggcgacatcgctaccctccaatggaagcaaattgacatggagggtggaatcatttcgatgacgacccaaaaaaccaagagacacatgaacaaccccatcatcttgcctttgaaggaagtgctggacagacgacttgccaaccgtgcgagcgattacgtatttccggtagcggcaatgcgtcacgcgcaggcggatcatacgtcgagcaaactttccatcgaattcaacgctctgctgaagaaattcggatacattgaaaagaatcctccagcagcgaaaggaaacaggcggagacttgcacctctgagtttccacagtctgcgcgcaacggcagttactgttctgcgtctggcgaatgttcctgcggacttgtgccggttcattgtcgggcatgatcctccttctgccagcggggatcggcaagcatccggaccagagaagcacggcgggatcggacctccggcaggtcgccatggcgccagccgggggcataggcatgcagcggaagttcttccggttccgcatcatccaggcaggaggcgtcctgcatgaaaggaaaggcttccacggcataccccagccggaggaagtctttttcaccttccaggagttctcccggcgtctggagcagcaagcaatgaagaggcatattcatggagagacagggaaacagtccctaatcctactgatttattccaagaaaatccaccatgaaaatgataccgatctctcattgatattctaattcgacgcttatgtaaaattatctctacaaagggttatcaagtagtttaagcaaatcccgggcttgctcatgcccttgctgggccgctttttccaaccacttccgggcttctgcctcattttcttccgttccccttcctagttgataaagcacacccaatcgaaattgcgcgttagcattccctgatctggccgctcttccataccatctgaatgcctcctgatcattctgttctactccggagccttcctggtacatccatgccaggttatattgagcatccacatgcccttgttgagccgcggcagaaaaccatttcacagcctcctgagcgttttggggaataccatttccttgaaaatacaacattcccaagttattttgggcatcagcgaatccctgttgagccgcaagggaaaaccatttgaccgcttcttttaaatctttttcaactccttttccctggacatacaaagtacccagattattttgggacggagcatattgttgcctagccgcagcagaaaacaacttgaaagcttcccgccaatcctgttcaacgccctgaccttgcgcatacaatactccaagattgtgttgcgctggagcaaactgctgcagggccgcagcagtataccatttcacggcttctttccaattttgctccactcctgttcctttttcataaaaagcgcccagattgtactgagccggagcacattgttgctgggccgcagaaaaaaacaattcaaatgcttttctcaagtcttctttaatccctcgaccttgagaatacaacacgccaagctcaagttgagccggagcatattgttgctccgcagcttttgaaagccacttgaatgcttccctatcatcttttgcaatcccctgtccttgtgaatacatgattccaagattacactgggctttagcatctccctgttgagccgacttttttattgaatctatctgcgcaatactagaacaagaagatgtctgagacatggcagaaggaagagccgcttcctgggaaggatatgcaaccgaagtcaaaaaaagacatgcaaatatgttatatatataaaatttaatctcccttcgcttcaacagagaagggagattaagaaatggaatagcatcaggataatttgacattacgatatacatatatcataacaccaaaatatcaagcattttttagaaagtaatacttatccctccaaaaaacgtatatcctacatgtcctccattagttggaatgttaacatttccaccaaccctccatgaaccacctctactgccaaaagaaccactggcacttgccccgaacccaacgcttgggatggctccttggactgggctgacatttcctcctgtcgtaatcccgtttgaacctatgttcacggtaccagttgcagatcccccccatccagaatttccgatagggtgtgtaaaagtgccagtgaaactaattttagtcccttggtctccagagccatcaccgccaccttttcccttatctgttcctccagtttttgaagtagtcttccccaaactatcttccgcctttttggcgatcatcatggcaatttcttccagtttcttttccagatctttgccgatttgggtacaaacttcatccggagttcctttgggagcatgctttttacaaaatgcaatacatctctgctgggcttctgcccgagccttcttctccagtctttctttaagttgcttcaagacattatcaagctcaattaatccaagataatctatcgacaacttattacttacaaagcagtagagattgaacccggcattttccgccatcggatcgcggttgatccagcgtccatcaagtacgttgtagtagcggtaattgtagtaaaccagcccaaggtcgtcatccagatattcgctggagaatcggaacggattgatctccgccgcgtttccttccatcttgatgatgtctccataggggctgtattcatacaaggcgcgccttcctccctggatgccgaacaaggccgtcgtgttcttgagcaagtcgtgcgtgtagtacaggtcttcctgataaacaccggcttcgtcaaagacactcatggcaaggatgcgagtcgctacggactccatcgggtcccacagataggtcttgcgcaggatgggagaggccgtctccgtctcattggtggcgtccagttccgctacctgcaaatagcccacgtagatgaaacgcttcctggacaccaacgtgttcccgtcgtagacggtcttctctacacgtcggttcaggtagtcgtacacgcattcaatgcgtttagtgtccttggtgaaggctgtagcctgattctgagcgttgtaagctaccgtccaaattccggttgcggtttttaccagggtctcgttgccgtctgcatcatattccgggaaaaattctcccggcagggaggcaggtgccgcatcgggaatggagttgatgatgacgtgaggacggacggacgtgtattggttgagcggattggttacatagatgaccatgttgccatgttccagggatgtggtccggttgcccatgttgtcataatggtagctatagcttctgccgctgcccaacgaatcggaaatcacttcactgcggtcattgtaagtgtaggtatgaacaagatccggagtaggagtattgaaataatccttcttcgtcgccgggcgtcccagtgcgtcatacgtgtaatccaccttggccgggtagttctgacttcctgggcgcaggtagtccatcttgaccaccaggtcccgcttctcttccagcgtgtaccatctcttcagcgtattgggatagttcagcgtctccagcaatccgttggcggcattgtagccataggtaaacggagtcgccaccgcgttgagggaaaccgtggaaggccttcctgcggaatcatacccccagcccgtttgcagaacagtactgcctccgtattgcaggctgtagcctgaagctcgcccgtaggcgtccttcactgccgctagggaactttctacaagtcccagcgtgctttccccttccacttccccgtactggttgtaggtgaagatgcgcgtcccgctggcatcggtaatgccggtgagctggcccagatggttataggccgccgtgatggagggagtgccgtcgccataagtctcgcctgtcagcagcccggtcaggacgtcatagctacgcgtcatgacgtttcctcttccgttcgtaaaggtggaaacacggttgagcgtatcgtagcttgtgtcctcgtgggtttcatccgcataagtcttgcgggtgggcaaccccgtagcggcgttgtaagtccaggccgtcatgtctccatccgttcgttctcgcggatcagtcgtgatagcttccgaggaaccgcggaacgtcgtcaggccggtgatctggtccgcatcgttgtaagagaacacggctggctgaatcgccgttccccattcggcctccttgcgtcccctggcgtcataggcataacaagccgtcttgcccatggcgtcggtgatgcaggtaggctggtccagcggctgcccgtaggcataggacgtgctgttttccgcggcatccgtcacggaaaggaggcgcagggctgtatcgtacacttccgtcgtggtattgccgcggctgtccgtataggccatcgtcatgccttgggccgtataggagtggctctggctggtggaaattcctgcataatcggtcacagtggtggtaaaaccgtccacggtatgaatcacggctgcatccgatactccgggctgggtcactttccgcaccctggcggcaggttccccgtattccgtccaatcggcgctgtcatgccccctggcgtccgtcgtaaccaccttgctttccagcacggggttcaatgaagaaaccagcgtagcttccttccggacaatgggcgtgccttccgctgcgtattccgtcgtcgtgacaagtccgtagacgccctcttcccgttgttcacgggtgtaggtatattccataacccgtgaattgagcgtggtcggttcatcggaaagagcgacggtttccttcgtcttgttgccaaaggaatcatattcatacagggtgggagccagtgtttcaagctggtcgcggacaagctggcctttggcgttgtaagtcagatggcggtaattgcttccattcctcgtatgcaccgttgccacacggatttgctggccgaagccgtccgtaatgacgcgtccccggacaacgcgcgccgtcccgttgagaacggtcgttgtcacgcggaggccgtcgcttgccatatcggtttcaaacttgaggtcctgctggcccgtcccgtgctggcgcaggatcgttccatccgcatggcgctgggtgatgagcgttcctcccatgggagtcgtgacggtttccgtcaggccattcgcgctgtagctgtgagtggttatccgtcccagagagtctgtctcgctggtgatgcgtcccagcaggtcgtaggccgtttccgtggcgacgctcatggctccagtgtcggtccgagtcgcagtggcccggtccagggcatccttcgtgtaactgacgatggtttccggagttgtcgctgtagcggaacggatcgtctcaaccagcagcctcgcactgtcgtaaccgtagtctgtccgcacgccgtcttcatccttttcccaaaggatgcgtccgtcgcagatggattcctgttcggagacgcgcccgttgccacgggtgcgcttcgtccagcggttcattgtgtcaaattcatagtccgcgctgtccgtaagcgtccaggtattgtcggaaagcagtacatggctttcttccctcaccgtattgccctgaggggtaatgaaggagacttttctgacgctcaatcccggaaccacttctccgttgacgcgggtttcctgcgtttccgtataagcggctccatgctgcgtcgtggcggcatattcataatgggtctgcacgccattgacggcctgggtcatcttggtgcggccctgcgcgtagctgttgggagcgctccccagccacgtttcctgcacttcgagctggacggtctccgtctcaagagcggtcgtgcggatttccacgcgcctgacatgatcggcttggctgtacgtgtaggttttcttccacaattcaatggggttattggaaccgtcgcgcatgaggcggcgttcttcggcaacatcgctgcttacttcgctgtctccatccccggtcacataccggtatgtcgtgtcctgggatttgccgccgcaccagggctgcctttccagcgtcaggcgtcccagcatgtcgtaggaccattcccatacgcctccatccgggcgcgtttccttcttcttcctgccgtagtagtcgtattcatagatggtcgtctgtgcaagatcgctgccatagccatccactttggtaagaagcaggtcgccataagccgtcgtctggtacacttcgcagacatgggaggcggcagctccgtcttctcccctggaaaccgccgtaacgagctgccaggtatctttctccagttccgtccgcgtccggcgggtcacgatggcttcagcatccgttccctgcgccatgttccaagctttgccattaagccaccattccgttttgaaatccagccttcccggcgtctgttcggtgacggagaaacggcccgtggcggcatctccggccatcacgaacttcttgaacggttgtcccataacagtgtaaagcccctgttcatcctgcccggtaatctgggaaggagtgtaaagggcaatcgtatagccgtcagccgtgacggcttcaatgttgagcaggccgtcccagaggttccatacctggaggaggtctcctgcactgtccctgttgacgcgcagataggcgccaatctgctcggctgtgtaaatattgccccacctggtcgtgtaggaaacaagggctccggttctggcgttatacacggcaacgctcttgtccgtcttcatccactggacgcacaaaacaccgtccaccgttgtgaagaaggcacggttcccggaagacgtaaactcgccgacgatcgtcagcgtttccctgtccacttcacattgaacgcaaacacgcccggctcccgtgacaatatcaaacgtgcctccagccacaatgccgacttccggaatatccaggaagcttgccagcatggagtcgtagcagagggcatggggatggttcagcccatcggtggaatcggtcgccagcaactcaatggagccggtggaaatgccgcccagcccgcggaaatggccgaagtcagccccccagtacatcagggaagcgtcgctgattgcctgtgcgttttcacctccggaggaagtgttcccaaaaacggaagccaggctccttgatcttcctgccgggggcggagggcagccccctccttgaccatcaaaattgcaacaatcacaggttggctttttcttaccgcctgcggtagcggggccttccttgtctatataggctttaagatcgtaatcgcagatggaaaggtttttttccttgggatcgtagtcgatgttgctctgttccacatgcaaggtgtattcaccggatttcaaggtgaactcaccgctttcctgggtccatttggcatgtcctccctgcgggccttctcctccagaagtcatgtcgatggtttgttcccctacggacatcttgccccagtcatccacggtaagggtcatgttgcacgtcgcttccagcggttccggggattcggggacaggattctccgttgttggctcgggaacgggggcggagggtaccgtaaaagagaaatcaacggtctccatatgatcaccgctgtcggacggccctcccttatagtagctgccggaagaggagaaatcccagataacatgccagggtttgggttcaggttcgggttcctcattcagaaccatggctcttccacgggctgcttgaaccattttggggctggaataccacctctggtagacgggaacggaggaaactccgttctgaatgttcatggaattatttgttttcatgattttaatttaatttgttgatgttgatatgatagtgcagccgccctggaaaatgcccggaaggctggcggctgccagggacctttccgggagaaataaacagaaaaaaaagtgcagtgggttatctccctcggcaattcatggggtgtgatagcataacgttggatattttgtaaaataatggattttttgtattgtctgaataattgatgatctttactttacagacaaacatccggacacgttatgctatcgcacatttatacctatgcctctttgcagggcatcaggaagacggtcttgttgtccaggcgcgtggcacccagggccagctttcacggtgatctgttcgcgcacgtccacgtattcggaacgggcctccacgcggaactgcgcgtcccgccacaccccgaacttgacgcgcgagcgcagccacgcgcaacagagccggttaccctgctcatcaatgggcagcatgttggtcaccaaaaatttcaccttcaaaaactcgttgacttccccattagtcagggaggaaaagccgtagttcctgttttgtgtttgttccatgagcaccatatccatgtgctgcttgggggaaatagccaccacaatgtcgtccccctttccggcgcgccaggcgttgatgatctggtaacggcacttaagttcggcaatcttgtcgagatcatacctgcaactgtcctggtgcctttggcgacaaaatccaccgggatcacctggaaggagttttccgacgtgtcgatggcctccaccgtggaaccgtcatcccccgtataattgattccaaaacttccgccgcaaatgccttcctcctgggtgcggatgcgataggtgttgtccgtgtcctccgtcatgcccagaatcacctcgtcgtgcatgcgggagagggcgttgcgctgctcgcccatcaattccgcggcccgcaggtccagcgtatccatttccaaacagccaggggaatatcaacagcatcaccagttccagggacggcatgctgagtttcagccgttcctccaacaacctcaccatctcccaatacggagtctcccaggtttccaggaatgttcgcggagaagccgtcccgcagggagctcccgtcaaggtttattcctacgagtggaaccccgtcaaaggggcgatgatcattacaagccgaagcccccctccggaattccgccagaaaggaaaaattggaccatacccatccattttccgttcttacccgtttttctacacggagccgtcccccgggaaacagaaaactgggttgagacaatggaatccccttaagtggcattagcagcgttcattttcattcctggcagataataccccgcagccggagagccattccgggcgttctgcccgtatgctcctgctttgccgctcaaaaaagcgccagcatgaaagcggacggcctttcccattccatccggaaagcggtaaccgctgttaagacagactccggcacccctatctgcaccatctcttcaacgaaagagctctttttctggtcgttcagataaggtcggtgtcggcacttctatacgccgtcccaattctcaacccggaataaaccaatgaataatacgactcaatcagggacctctccaacaggtcccgctacaaccaataacgctccggcggtaaaatccgtccttcgcatgggggtatttacgctcgccatgattaacgtttccgccattgtcagcttgcgcggcatgccggcggaaagcacgtacggactcagttccgttttttactatatttttgcagcggtctttttcctggtgcccgtctccctggtagccgcggaactcaccaccggatggccgcagaaaggcggcgtttaccgttgggtaggcgaagccttcggcaaaaaatgggggttcctggctatctggctgcaatggattgaaagcaccatctggtttccgaccgtgctaaccttcgccgccgtctccctggctttcatgggacccggacagcgatgggatgaagctcttgccgccaacaagtggtatgtgctcatcgtggtgctgtgcgtgtactgggcggctaccctgctcaacctgcgcggcatgaaaacttccgcaggcgtcaccaaatggggcaccatcatcggaaccatcattccgggcgccatcctgattctgctgggcctgagctattgggccggaggcaacccgattctgctggacatgagctgggacaagctgataccggatatgagcaatttcaacaacctcgttctggccgccagcatcttcttgttctatgcagggatggaaatgtccgccgtgcatgtgaaggacgtgaatgatcccggccgcaactatccgctggccattctgatttccgccatcattacggtactcattttcgttctgggcacgctggccatcggcttcatcattccgaactcccagatcaacctggtgcagagcctgctgatttcttatgacagttacttcagcttcttcggcctcggctggatgaactggattctggcgcttgcgctggccgtaggcgttctggcccaggtaacagcgtgggtgggaggtccttccaaaggcttgtaccaggtaggcttggctggcaacctgccgcccgtcatgcagaagcggaacaagaacaacgtccagatgggcatcctgctcattcagggctgcatcgtcaccctgctttccatcatgttcgtgatcatgccttccgtgcagtccgcctaccagattatttcccagcttaccatcatcctgtacctcatcatgtacatgctgatgttcgcctccggcatttatctgcgctaccgggaaccgaatacgccccgcactttccgcattcccggaggcaagaccctcggcatgtggattgtaggcggcctcggcttcctggccagcctggcggccttcctggtgagcttcattccgccgaaccaaattaccgtcggcagcaatacgatgtacattatgcttctggtgataggcaccttcatcttcgccggcattcctttcatcatccatgtcatggccaagccctcctggaagcggcctgtggatcctgaagacgccttcgaacccttcggatgggaaaaaaccaatggaacccattctacagtaaccccaatccataccatatcccatgagtaacgtcccttccaatgaacaaatccagacggctgtggacaacgcgtacgcctacgccaaaacggtccagggaggcaaaaacgcctcctacatccccgctctggcgcaagtcccctcagacttgctggcgattgccgtagtcactgtcaacggagatatcctgaccgcaggctccgcggacacgccctttgccattgaatccatctccaaggccttcaacctggcctacgtcatggatctgatcggaatgaaggagctgcgcacgaagatcggggcagaccccaccggggagcccttcaactccgtgatggcgattgagctgcacggcggcaagcccctcaaccccctggtcaacgcaggggccatggcgacagtcagcctggtcaacggttcggactccgatgaaatatgggcgaacatgatccataatttcaacaacttcgccaatacggccctgaccgtgaaccaggagatttacaagtcggaaagcgccaccaaccagcacaaccgcggcatcgcgtggctgttggacagctacggctatttttacaatacgccgcccatgatcgtggacctgtacacccgcatgtgctctctgaacatcaccacctcccagctggcgctgatgggcgcctgctatgccaacgggggcgtcaaccccgtcagcaaaaagcgggtggtgaaggatgagaacgtttctcccatcctcgcggaaatgtgcatgtccggcctctatgattccacaggggactggatgtacaaggcaggcgttccggccaagtccggcgtgggcggcggcctggtggccgtggtccccggcaagatggccatggcggccttctccccgcccctggaccccgccggaaacaccgtcaagggccaagcagctcttcaatccattatcaaggaattgaatctgaaccttttccggagctaatccgggatgagaaggtaaacccgcggagccaagatccgaaaggatacccgcgggtttactgtatcccggccacacgaaataacgcgccgccttccgcgcttgccggaaattgactgtccagccgcgggcgttaagtcctgtttgaaaaattgcaccgctgcatggatacgccgtcttccatggcatggaagccatgcttttcataaaaggcggcgttcctgctctcctccggcatgatttcaatgtacaggtagtccttgtacttctccttgaccatttccatcatttttcccgcaattcccctgccgtgatagtcgggatgcaccaggacatagtgcatgtaggctaccagctcgccgtcgtccagcaaccgcaccagcccgaccagccggtcgccatcccacgcggtaaataccgtggacgaattcatcagggccttgtacagccgggccggatactggccggaaatccatccaacggacaggaacagctcctgcactttttccctggtaaacttcttttcttccgtaaaaacaatcatttttccccttggttcaagatgatggccggaatgcagcgtgacacccgcatgccgggcaatggggcaacgtcatctgccgctcccgtcatagtccttatgataaagaccgcagaccccggagacaagcaactatcatcccttccttcattcttcattaaacagcatgaggagagccggaggggcttgaggcactcctccacattgatcacatggaagttggcttccgggccagccccggccgttctccatggaagattaagccaacgcgcccttgtaaaaggctttcctgcgccggaaccgcagaagttgtttttccgtgcccttcccgtgttttaaggacttgccaccacagcatttttccttagagtctttccggtatgcttgaagccctgcaaaacgcctttttccagaccggggacgcgctcacaacctggctgtccgccttcagcagtttcctgtggggatggccactgctcatcatgctgcttggcactcacctgtacctcaccatcatcctgcgctttcctcagcgctacctgctgaaggctcttaaactgtactttgtgaaggaccatacggacaaaggggacatctccccgttcagctccctgatggtggccctggccgccaacatcggcgcggggaacatcatcggcgtaggcgtggcgattgccgcaggggggcccggagccatcttctggtgctggctcacaggcgtactgggcatggccacgcggtattcggaaggtctgcttgccatcaagtaccgggtggaaaacaaggacggcaacatgagcggcggtcccatgttcgtactggaacgcggcatgaaatgcaaatggatgggcgtggccttcgccgtcttcacggccattgccgccttcggcatcggcaacctgacgcaggggaacgccgcggcggaacagctccatcacgcattctccattccctcatggggaacggccatcgtgctgactgtcctcacggccatggtcatgctggggggcatccggagcattgccagggtatgcgccttcttcgtgccgttcatggccgtcatctacattctggggtgcctgtatattctggccgttcaggcggactacgtccttccggccatccggtacattctggactgcgccttcacgggggaagccgccgcagggggcgtggtgggagcggccgtcatgacggccatgaggaccggcgtagcccgcggccttttttccaatgaagccgggctgggctccgccgccatcgcctccgccgccgcacagaaccgcaaccccgtacggcaggcgctcatctcttccagcggaccgttctgggataccgtggtcatctgcgcactcacgggcattgtgctgactaccagcatcctcgcccacccggatatttcgtccagtgacggcccccggctcactacgctggcattcagtaaaattccttatgtgggctcccccctcctgacggtcagtttggtcacttttgtagtctccaccatcctgggctggtcctactttggggaaaaagccctggagtacctggggggcatccggctgatcacgccttaccgcgtcatctgggtggcggcggtctttaccggctgcgtttccaagatagacctggtatgggtgtttgcggattgcgccaacggcctgatggcccttcccaacctcatttcactgctggccctttccggcgtgcttgtccagcaaacgcggtactacctctggcagcacaggctggacgattatgacgattcccacattccggaaggcagataacgatttttttaaactcagattcaaataattcttgcctttcggcctccggtagtatttacttcgccgcgcagtccctgcaaacctaaaagtcgcgttcgtctagcggtctaggactcccgcctttcacgcgggcaacacgggttcgagtcccgtacgcgatgccagctttaccgccgcagcagttacgatgcttccgcccctccttaccagggaaggcatattggaaagacgtaatggctgcggttttcttttggtccggttcctccggaatcaggaaagcgcggacaggacagcaggaagcggtatccccctccttttcaaattccggaacatgtcttacatcccccggatttggctttcagaaagccctgttatcttttaaaatttcttacacgcaaacgccatggattacacacctctcattgaaaaacgccgccagcgcctggaagaattggaaacggtcattgccgaaccggattttttcaatgaccagaagcgggcctcggaaaccatgagggagcaccgccgcctgaaggaactgatggaaacgtgggattccctgaatgccacggaacagcaattggcggacaatcaggagctggcgaagacggatgacccggagctggcggaactggccgccatggagattcccgaactggaagccgcgctggaaaaactgcgcagcgacgtgcagtacagcctgcttccccgcgacacgacggaagaccgggacgccattattgaaatccgcgccggaacgggcggggatgaagcatccctgtttgccggagacctgctgcggatgtaccagcgttttgcggaagaacgcggctggcgctttgagcatctggaaagcagcccgtcggacgtgggcggcttcaaggaagtcgtctgccgcattgccggggaagaagtgttccgcttcctgaagtatgaagggggcgtgcaccgcgtgcagcgcgtgcccgccacggaaacgcagggacgcatccacacctctaccgccaccgtggccgtcatgccggaagcggaggaagtggacatagaaatccgcccggaggacctccgcattgaagtgtgccgttccggcggcgccggcggccagcacgtgaacaagacggaatccgccgtgcagatctggcacatccctacgggcgtctatgtccgctgcgaggaagagcgcagccagatgaagaaccgtgaaaaaggcatgaagattctgcgcgccaagctctttgaagccaagaagcgggaagaggcggaaaaatattccgccgcacgccgcaacctcattggctccggcggccgtgaagaaaaaatccggacgtacaatttcccgcaaaaccgcctgacggaccaccgcatcggctatacgtcccacaatctggacggcatcctgatggggcagatggaagacctgatcatggctctccagcatgcggaaatgcaggaacgcctggcggaagccggcatgtcctaacccccttttcctttcatgaaaaccctactggaagttcttcagtccggcacggactacctggcgcgccagggctgtgacgaggcgcgcgccaccatgcagcacctgatggcccatgttctgcactgcaaccgcacggctctttactcccggtttgacaggcctgttgaagaagcggaactggctcccctccgcgagttgctgaaacgaagggcggcgggagaaccgctgcagcacctgctggggttcacggaatttttccggagggatttcctgacggacgcgcgcgccctgattccccgcccggaaacggaagaactggtggaaatggtgttaaagaaaatcccggaccgtccggtacgcgtgctggacatgggtaccggttccggcatcatcggcgtcacgctggctctggaactcaaggagcgcgcgaaggaagtcgttctggcggacatttccccgcaggctctggacctggcgctggaaaacgccatgcggctgggagccagggtctccaccgtccagacggacctgtttgaaaacatccccctggaaaaaccggtcctgcgccaggaaggagcggattcttccgcttccgtgcctgaggaggaagagaaggatgccggacgggaaatgcgctttgacgtcatcgtggccaacctgccctacattgcggatggagaggagcttgccccggaagtcatgaaagatccccatacggccctgttcggaggcccggaaggctgggaaatcattgaacgctttctggcccgcgcccgggactacctgaatgaaaacggcttcgtagccctggaaatcggacatgaccaggcggcagccgtgacgcagattatggacggctacggctataattacattgaagtgctgaaagacatgagcggcgtagcccgcttccccttcggttatcattaacaattattccttcccccctttcactccatgcaggcggcgcgcattctggttgacggacaaagcgatctggtgctggactacggcattccgccggaagcgggggacgtcaggccgggctgccgcgtgcaggttcccctgcgcaacaggacggccaccggcactgttcttacgctgtccgagccggaccctgcctggaaggacaggctcaagcccattctgaaactgatcgacccggaacccttgatttctccggtcatgatgaatctggcttcctgggcggcggactattattccgtagcgctggaccaaatgatccgctgcctgctcccggaaaccgtccgtcaggaaaacacggcggaaaaaatgcggaaaatggtgcatctggaaaaacgtccgtcccgtgaggagctggatgccctgtaccgcaaagcgccccggcaggcccaaatgctggattatttttcatctgcggaacagatggaagcgcctctggccgcattcggcacgggggctctgaacatcgcccgcagcctggcggccaagggcttcatctccctgaaggaggaatccgtgcaccgcgaccccagcaccggagagcagttcgtccccagccagcccatgaagctgaacgaccagcagcagaaggcgctggaagaaatcacggccatgtgcacggcggagcacaaaaaaccggtgctcctgcaaggagtcaccggctccggcaaaacggaggtttaccttcaggccgtctcccaaatggtgaaatccggaaaatccgccctgatcatggtaccggaaatctccctgacgccccagaccgtccagcgcttcaaatcccgttttgcggaactgccctcttccgtggcggtgctgcacagcctcctatcggacggagaacgctttgacgaatggcacgccatccgttccggaaaagcacgcatcgtcatcggcccccgttccgccgtcttcgcccctcttcagaacctggggctggtgattgtggatgaggagcatgacgcgtcctacaagcaggaaagctccccccgctaccacgggcgggacctggccgtgctgcgcgcccatctggaagactgcgccgtggtcctgggctccgccaccccttccctggaaagcatccataacgccctgaccggaaaatattccctggtgaagctgacggaaagggcggacggccagcagctccccctcatccgcattctggacatgaagacggagggcagaaacaaatccggccccaacgtcatctccgagcggctcagaatgtccatcgaccggcggctggacaagggggaacaggtcatccttctgctcaacaggcgcggattcgcacgctccatccagtgtccggactgcggccacgtggtgacgtgcctgcactgctccctgcccctgacctaccaccgtacggaggaccgcctcatgtgccacctgtgcgggttcaaggccctgccgccccgcacctgtccggagtgcaggtccgccaatatcatgctccaggggtacggtacccagaaggtggaggaaatcctgcggcgcacctttcctgcggcgcgcatcacgcgcgtggatgcggacgtggcccggcgcaaaaacgccgtcagaaccattctgaaccagttccgcgcccataagatagatattctccttggcacccagatgattgccaaggggctggactttcccaacgtgacgctggtgggcgtgctgaacgcggacctgggtctccatatcccggatccccgcgcgggagagcgcaccttccagcttctgacgcaggtggcgggccgcgccggccgcggcgacctttccggggaggtcatcatccagacctttaccccccagtccccttccctgcagtacgcccgccatcacgatacggacggctttgcggcgcaggagctggaaatgcgccgctccttcgacctgccgcctttcacccacatcgccgtgctgaccatacgctcccagcatgaaaacatggcggaattcgccacgcgcacgctcgcggcgcgcctccgcggcatgctgccccctccagccacgatgacggaccccatgccggcgcccattccccgcgcacacggccagttcagattccagatcacggtcaaggggccgtccgcccgcatcctctcccgcaccctgcggaagctggtgcaggaagccgggctgggggacgacctgaccgccgtgatcgacgtggacgccatgtcattcatgtaagccgccttgccaaatccggacggccgcattaaaattccggcacaacacaacttactattatgctgcttcatttctacaagatgacgggcgccggaaatgactttgtcatggtggacaaccgtgacctggaactttcctccgtgctggacaaggagaccattgaagccctgtgcgaccgccgcttcggcatcggggcggacggcctgattgccgtggaaccgtcccggggcaaagggggaaccgtgcgcatgcgctattacaatgccgacggcggagaagcggaaatgtgcggcaacggagcccgctgcttcggcaacttcgccgcggccctgcttcatcacgacaaatccgctcccctcccctttgaaacgatggccggcatcgtgaccgccacctttgaaaaggacgggaatgtcaccgtgaacctgacggatccccactccctgcagctctttgtgctgaatgcggacccggcggtgggggcggacgtccacttcctgaatacaggcgttccgcacgccgtagcgtttctggacaagctggacggcctggacgttccccgtctgggcgcctacctgcgttaccatagcgcattctctccaaaaggcaccaacgccaacttcgccaggatcctgtctccggggcacatcgccatacgtacttatgaacgcggcgtggaggatgaaacgcttgcctgcggaacgggcatgaccgccagcgcgctgctgcacgccgtattgacggatgccccttcacccattcaagtggacgtagcgggaggggacacgctcaaagtaggcttccagcgcacgggagaccgctttaccagcgtgacgctgaccggaccggcggacctcgtctttaccggagacatagaactctgaccggctcctcgcggaaaaacgccgttgtcctccgtcatcagggagcatgcctgttcagcagggaacactctgcctttacataaccgccgtaattgttgcagaatgccttgtacacggcagggcccatattcgtctcgcaataatactttacggtaatgcagtccttcttgcgttccacattcagaaaacggctggacagcagaaccaggttgctctggtaattccacagggccatgtcacgcgccatttcctcattgatcttctcacaaataaaactctccggcgggggaaacaaaatggcgctgacaacgctgatcaggcaaattccgggcaccactcctatcgcaagcactccgtggcacttcctgacaaaggggatgtggttccggaacttccggaagaggaagaaacggaacaaataacccgccagcagcatcaccggaaaggaaacattcacgtactcaaaagccaggctcattactccaagggcaaaaaagccgatgcccttccacaccttcctgtacaccgggatgcaggcgcaaagaaacacgtacagaatatatcccagcagacagaggaacgggagaagcgttcctgtaaatatgtgctccaccatgcagtcccacggatattccctgctgggagcacatgcctcatgaaaaaacatgcacaccatgctcagaatcaccagcccggcaaggaggatggcctttacttttcttgattcatacagaagccacagcaaaacgacgccaaaaggcagtaaatagcagccgatactgctgaacacagtggacaacatgggaatgtgaggaaagaaattcatggcttggatagggacaactggctggttaacgactcaaaggcatctgtgactgtggcaacaataattggaaataaaataaattcaaacattcgttttcaaataatgcagaaaaaatcatattcttctcataaaaaaccgttcagcacgactctccaacttgacaaaacaaccttctggaaaagataataacgctctgatgaagcactctcttttcctcccggcggccatccttcctcttctcctctctctgccccaatgcagccgcaagccgctccttccggaatacacgcccctgtgtgccggaatggtgcccggaaaacacacctccccccgcgccctccaggcacgggaaaacagaacctaccgggttggcccgaaaggcggtgtgtattacatcaattcccacaataaaaaagtctacatcaaatccaggaggattcaatagaagaccacgcaaacaccccgtaactttccaaatgggaaacaaataattgctttacccgtcccttattttatttttgagaaaatattccgtctaaaaaactcatcaaacttattttcttcttgccaaaacggaagaggacgggtaatgtctgccgcaccacaacattaaatggtgtcggtagttcaatggtagagccccagattgtgattctggttgttgcgggttcgagccccgtccgacaccccatcccctttccttcatgaaaaagagcacttatggtgctcttttttactatccatccgcatgcgcaatccagaattcgtcaaagccgctttttccgccattgcgccgcgctatgtggccaccaaccatgtactgagcatgggcgtggacctgctctggcggcagcgcgtcgtgcagctcgtctccgaatggaagccggaacgcctcctggacctggcgacgggaaccggggatctggccctagccatcctgaacgccatgccggaaatccggctgaccggttccgacttctgccagcccatgctggacgtagcggccagacgcggactggacaacctggtctgtgcggacgccatgaacctgcccttttcctccgcctcctatgatgcagtcaccgtcgccttcggcctgcggaacatggccagctatccggacgccctgcgggaaatgggccgcatgctgcggccggggggccatttgctcattctggatttctccctgcctgaaaacctgctgaaaagcccctaccgtttttacctgcaccgcatcctccccgtcattgcaggctggatgaccggccaccgggaagcctacgactacctggcggaaagcattgaagcctttcccagcggccaggccatgcaggacctgctccgggactgcggctacagcaacatcacggcagaacccctgaacgggggaatcgccagcatctacaccgcccagcgatgagtgcgggtgacgcgagagagggcattatccgcggcagggcgtcgcgcgcccgcctggggggtaaacttgccggactgtccctgccccgccagatcgccgtcattgccttctggcccttcctggaacagcttctgagcttcttcgtcacctcctccgacctcttcattgctaccaaaatcgggctgaacgcgcaggacaccatcaacatctccgacggcatgggggccgtcgtcttcctcatgtggttcggcttcgtcatccaggggtccatcatgatgggggccacggccatcgtctcccgcatgaccggagccagggattacccccaggcgcagcacgggctgcaccaggccgccatgctgggactgctggccggcatcatctcctgcgggctgctcttcgcatgcagcggcttcctggtcacgcacgtgctgaccatgaatgaagccgccagggcctacgccctgcaatacgtctatgtggccgccttcgcggcccccttcagcggcgtggtctttgccatcaatgccgccctgcgcggctccggagacacgcggctgcccttctggatcatgatgggcgtgggcatcctcaacgtcattttcagcgtcaccttcgtctttgcggacgccccgctgggcggctggcgcatcggaggcattgcggcgggaacggtctgcggctacggcatcagcatgtgcgcgctcctcttcatcatgctgcggcgcaggaaaaaaatattcgcgggaagagaaaacgaatccctggaagaactcgtcaaggaacgcggggaacactatgctccgccgctgtacctcagcttctcccatctgcggccggacatgggcatgcagaagcgcatcctgaaaatcgggctgccgcaggccgtggaagtcttcggcatgtggggcatccagatgttctgcctctccatcatcagcgaactgcccatcaagggcgtgctgggcgtccacaacatcgccgtccgcattgaatcgttaagcttcctgcccggattcgccatcggcatggcggcctccaccctggtggggcagtacctgggagcccggaacgcgctcatggcccgcatcaccatctggaaatgcatgcggtacgccatcatcttcatgacggggctgggcgtgctcttctgcgccttcccctccctcttcatggagatattctccaatggcaacatgacgctcattgacaccggcattcccgtgctgcgcaccatgctgctggtggagcccttcttcgccgcctgcatcgtgatgaaaatgtccctgcgcggcgcgggcgacacgcggagggtcatgttcatctcctacggcatcatgggcttcttccgcgtcgtctgcacatgggtctggttcaagctggctccggaaaccatgaccctgtggggcatctggctgctcttcgcctttgaaatggccgtccagtccaccatcctctataaaatcgtcaagggccggagctggacaaaattgcaagtctaacctcccggacgcctttcccggacgcgtgcaaatccaaaacgtgatgcctgcataaaaactttgctcttcccgtcaaattctgctatcgtttctccacgttgttcttcaacgggctcgtagctcagcggttagagcaggggactcataatcccttggtcgtaggttcgaaccctaccgggcctaccattttttcttgagtggccttacctatgcctctattttgcaagattttccaccgcaaacggttcttatggcattcagattttgtcatgctttccgccacgcacggctttttcagtttataatggttccaaaataactgatgcaccatgtgatggctgaatgcaccaatgctcacataaagcattccgggctaggagcggtgaaacagttttttgttccactttttcaaacctgcctctaatttttccctgggggttttcttcctgccactcaaattgcggatgaaaaaatccctgtagttattgacgcaaaatccgtttccccttctcctcacctgttccacgggagaagtaaatatctcaattagagctgccttcagtctggcctccttttcctgagcccgttcaatctgccaggggagccgtttgggttcagccatcatggcgagccatgattcatcatcttcatcaattcttttgatttccgctacaacttcgtccagagatgaataccggtggcaattaataaatgccctgggattatagtcctcctcaattaatggatttccccagtaaatagggatggagcgggccagaaagctcgtgattattttttctgttgaataaccccggtaccaggcattttcacacgcaaaggaaaacttataggggtttttcaacagaatacttcccttgagccagtcatcggactccctgggaacggaacagggtgtattgttcaaatgctttcctatggaattgatcttcttgtattcagaaagccgggaaaacaactggatgcggtagggatgcccttctccatgggagtagatataattgcagaatccgcttttccggttcaggacatcagccacattttccaatggcagctgatccgcctggacacggtaggaggataaaaaaggcatctccagaacgcgccccccatgatcggcggaatcaaaccctatgtgataatcgaacaaattcaaatctggagcgagggcttctccatatacatccatgatcgtaatttttcctatggaatcctgtaaaaattgaagatatgtctctttggaagaggtatacaaccaagggaaggcaataagaaaatctgcgttgtccctgtctatttccaattcaagaatagatggatctatcttcctgaaacggcatagaaaaccatcaatctgccattcctcagcgccctgcataaacccgatttttactttcattccctgtttctcaaattgatgggcattatacagtcccatgtaagctagtcaatctgaacgaagacagactcaacatcctcatatattccatgcaagctttttaaatccatcagggagccgtacaatctcatagtatatttcctcttgaaaaaagcaggttcaccgaccataaaataccaaattcagtccacctgttattgatggaacaaccaaccttgccatctctccgtgcctcatataatagaactcgtgtttttacatggaattccctcttcctgtaaaacgccgcccggaaatcctgaggagaatttccggacggcggagatttacgcatgaatggtgttcaccatggcggccaggtcgtcgtcatacacgaacttgcactgatccccacgctgcttgaacagttcaaacaggcgcggcatgtctgtatccggaacggagaagcccagcgcatccaggcgcattttcacggcatgcctcccggaatgcttggtcaggggcagttccgtagctccccagccaatttcctccggatccatgatttcataagtgctccggtttttcagaacgccgtcctgatgaatgccggaaccgtgggcaaaggcgttcgccccaaccacagccttggagcgcgagacgggcaacccgctcatggcggccaccatgcggctggtcctcaccagttccttcgtccggattccggtccccgcgccggaaaagaaatccgggcgagaatgcagcgccatgacgacttcctccagagcggtgtttccagcccgttcaccgatgccgttgatggtgccctccacctgctgcgccccggcacggatggcagccagtgaattggctacggccattcccatgtcgtcatggcagtggacggacaacctggcgcggctcacgttgggaacattggatttcaggtaggaaatcaggcggtagtattcctccggcatcgtgtaacccaccgtatccggaatgttgacgacggcggcgcccgcatcaatcacggcttccaccatttccgccaggaattccggctccgttcgggaggcgtcctccgcggaaaactgcacttccccgcataatccggaagccatggcgacggccttgacggccatctccctgatttgcccgcggcttttttccagcttgtatttccggtggatgggggacgtagccaccaccagatggatgcgctcccggtctccggcagccttcaatgcctcatgggcggcaataatgtccttctccacacagcgtgccagcccgcagacgcggcttttttccgtgcgttccgccacggtgcggacagcgtggaagtcgccgtccgagatgacggggaagcccgcctcaattacgtccactcccagagcttccagctgcatggcaacctgtattttctgctccacggtcatcgccgcgccggggcactgttctccgtctctcagcgtcgtatcaaaaatatgtatgtgttctttcattacagtaaaaatgttaagggttcgttccttcggaaactgcgcacggaaaacgttcctgttatggaatcattcctttggcgcaaatcaagaccagccgtttacttccttcgcgccggaacggctcaccggcgcatatcaagatatcttcacggactaccgtccgagaagcagcaatagacgaccttgaaggaacagggtgttcatcttgcttatttttaccataactccgccctgaatgggggaacaaggcagacgatgcatttttgacacggttttgtcaagaacggcgggatgcatgactttttccgcagaaaaaaccgtgcacgctcccccttgaggagaagctacatttcccggtgggaacgtatttcctgaatggagatggacagggaggcgcggccccggtacacgttccggtcaatcgtaaaggcgatgtcccagggtggattggggagttcacgctccgccccgttgaagaagatggcgtcacgttccaccattccctgccgcatgaagagtttcaggtggttggttcccacgcgcttgggcggctccgtggggaagacatcggaactcatgaagaggggctggggattggagttgccgaagggttccagcttttcatagctgtccagcaggtccagcgtcagcgcctggaaggagacttccatgtctatgttgagcacggggctgcgctgttcctccgtcgtggtttccgagacgtaccggttgaaggcccggcggaagtcgtccatgcgggcttcctcaatcaccaggcccgccgccatgtcatggccgccgccggaaaccagcgtatccgcacagtggtggatggcctgcaccagggatacgccgggaatggagcggccggatcccttccccacgccgctttcatcaaaggcgatgacgaaggtgggcttgtggtaccgcctcatgagctgggaggccacgatgcccaccacgccgggatgccacgcgcgggaacccagcacgatgacgttgtcccgctccggatcaaaggagttgtgaagcatttccaccgcatccgtacggatggcttcctcttcctcctgccgcttgcggttgtgggagtccagcatctgggcaagctgcacggcgcgcctgttgtccatggtcagcaaaagttccagcgcatccatgggggagtccatgcgccccgcggcattgatgcgggggcctatcctgaatcccacgtgcgcggcgttcaggaagcccgcgtggttggcggagtctgaagggcggatgcccgctatttccgtcagggttttcaggcccgtatggcggctgtgcgccagccttcccaggccgtggcgcaccagtatcctgttttcatccaccagggggacgatgtccgccacggtagccacggccaccaggtccagataaagtttcaggtcaaaggttttcagcttccgctccttcaggagggcgtgcgccagcttgaagaccacgcccgcgctgcacaggtaggtgtacgggctgttttcctcaattttggcattgaccaccgctacggcgtccggccggcccagcggccccgcttcatggtggtccagaatgatgacgtctattcccaggctgttgagcatctccacttcctttacggaggaggtgccgcagtccaccgtaataagcaggctgggtctttccgcacattcggagagacagcgctctatgcccgcctcgctgagtccgtagccttcccgggaacggacgggtatgaagtactgggggtccaggtcataggacatcagaatggctcggagaagcgccacggaggtgactccgtccacatcgtagtccccgtaaatgcacacggtttccccttcgtccacggcctggaagatgcgttccacggcggccctcatttcccccatcaggaaagggtcgctcaggtgggagagcctggggtccagaaagagctccgtttccgtccccccggtgaatccgcgctgcagcagaagttgcttgaccagcagaggcagttccgcgggaaacgctttcaagaccggatcatcctccttcacggaagggcggagagtccaatgaaagcccggtgtcatggcagtattttagccccgcatccaacagggtcaaggttgtttccacaacaagctgccaaagcgggaagaagaaggtgcctaacctgtttccgggagaatggccgccgttcccgccggaatgcgggttcctccttcccccataatgcatggaaacggccttcacgctgcatttccatcttttcaaagagaaaagctccgtccggggaaaatccgaacggagccgcagcatcaggcatcagcgcctgaaacaactatttccgggaggaaaagatcacctcattgatgatcgcgtccggctggggggccttgtaggtcaggcgcacggcagtggtcccggccggaatggcaaactcggaagctccgggtccggcgttccgcttgcccaccggcgtccaggatccctcgccgcggcgcacctggatggcgaaggcggcggaccctaccacgactaccttggcagccttggggttgtccagattggggacgatcacgtccaggggcttgtcagcacggtagaccgttttcaggttcctgtcgctcagggagaccaggctggtgccggggtccgacgggggaacgtcaaatttgaacatgttcagaacgatgtcctgttccttgccgcttttgttgaccagtttcatgcccttgattcccttggggagctggttcgccctggcaatgaagtttttaccctgcttgtccagcttctgcaccacgggcttggcggagccttccacgtccagctccacttctgcccaggagttgacgtcatcccgttccaggttgacttccagccaggaggcgtccgtggggccttccaattgcagggagatgaattcgccgggcttcattttgtgcgtttccatcacgcggttgatgcgcacgattttgtcggatttctgcacggagacgccttccagccccgccacgttggaggcggccatggctgaaggaggcgtgttgacggctatttcacgcacggcggtccagacggcgcggccgttgtccgttttcttcggttcaatgacgcggtagcgcacggcacggagtgagacgggcttgggcgccttccataccacctgcatgccggaggtttccggtcccagcggcttccaggttttcaggtcccgggagccttccagctgccccctggctacatagtcgccgtccttgtcattgcggcccatcagcacttccacgctccgtacgggaatcggcatgccgtagtccacgccataccagtctcccggctcgccgtaagcgccggaatgccagaaggagccgcggtctccgtcacaaaagagttccgccttgtccatattgccccccttgaccaggggcttgggggaaagggccggagtgcccgcaatagcggggaaaacttttttggaaacggtgtccgccagttcattgacggcgggggtcatcacccgggaaccggttttcaccacggagcggtacaactggccttcctggttgtggcggcgggaaatgccgtccatggccgccagggcctgcgtggcctgcaccagctgggtcacggcgtccctggtgttgttttcctccagcgccgccacggcatgctggccggcgcggcccagttgttcaaaggcatccacccacgcgccgatttccttcatcaagcgggggttgtccgccttggcccggatgacgggcgcggcggcggccatgcgggcgaattccttcttgagcagggccgtatccgctttggccaccttgccttcccgggcggcttccagcacgcgcttgaccacgggttctatttccacggattcctcacggcggtaaccgtggccgttgggcccctggtcggagttgtggttcacaaagacctgcatggcttccgccgcctgcgggaacaggcgcttgacgccttccttccaggattcctccgatttgaagccgttgatattccaggtgtagtccgcaaggccgaagagggagaccttggaggcctccggcttgtccatggggttggagacgaagccgcccatggattccttcgcgcccggttccgtggcaaggccgtacacgcggcccatgcacaggttggagcggcagtagtccgttacggggaagttccaccagacgtaggagggacgcttgattctcttgttcacccactgctggccttccagcgtgatgtcatggcagacggagtcccccgtccacatgacgtggatggaggggtccagacggtcgcccagaatgtccaggtaggttcccggcttggagtccgcccagccgcggttgtactccgtagggcacatgaccaggggggtgacgtcctttttcaccttgacgaattcgttgtttatcttgttgagcaggagcgcctgcatgtcccccctctttccctcgccgaagatgtcgtcaaagaacacggcaaaggaccggacgcccagcttgtacatcatctcaaattttttgatgacgttgttcatgtcctcttccgtccacttgatgtccttgccggggtggatggcccagacaaagtccacgtggttttccttcgccaccttcaccagttccttgatctgggcggcctggtccgcgggataggggtcccgccagtggggggaggagtggtagggatcgtccttcggcccgtagatgtatgtgttcatcttgttctggccgtaaaagcgcagttggctcaaacgggcctcatggctccatggagtgccgtagaagccttccaccgttccgcggaattcgatgtccggccagtccgtgatttcccctacgggcaaggtcacgccttcgccgccggccttcgtgccgagctgccgcagcgtctgcatggcgtaaaacgcgccccgctcgtcatgggcgcctatggccactttgccctgcggggagacgaccagcttgtaggccccggatttttccggaacgccgttcagcagcttgctggccgccgtcttggcggagcgaatcaccacggaaggctttccggagaaagcaaccgtctgggaggagagcttggactgctggggaaccgggtacacggcaggtgacgccgcaagggcggagccgcccagcagggcagccacgctcaaaccacattgaagaagttgaaaaccattcatgatgatgcgcgataatggaatcagaaaacactttccacctcaagaaaaaaccgtccgcacccattcctcaatacgtcaacccgggaaaggcgcggaaggaggcttccaggcggcgcgccttccggtctcttccccgcgaacgcttcctgtgccgccttggcccattccgccccccgcatgaaatccaccgccgggacggctctcagccaacggttccgtgcggctctttcaggacaggcggccatgtacctttttgcgtcttgcagtcccattcttccggtgtagaatacattttccctaccccttccctccccatggaatttttcattcttctgctggtcctcggcctgctttccggaatggtcttcacctttgtgaaggcctgccaggtcgtttctctggaacaaaaagtccgcactctggaaacggaagtctccgaattaaaggaacgtctgaattcccgttcctccccccagaggccccccgcggaaaccagaaagagccttccgccccctgtggaaagtccggtgcagcccatccgtacgcttcctgccgccgccccggtacgggaacccgcctgcgcccttccctcccggcacagcctgcagccggtccggaacgccaggcccgcaccgtcgcgccccgcgtccttttcctgggaatacttcatcggcgccaagctgctctcctggataggaggatttgtgctgtttctgggaaccgggttcttcgtcaagtacagcattgacaatgatctgatctctccggaatggagggtaaccctcacgtatctggctgccgccggcctgctgggcgccggcctgtcgcggctgaggaagaagtaccccatcctttccggcacgctgacctccacgggcatcctggtcctgtacctggctacctgcgccggacgcatgttttacgagcttcccttcttcacgacggccatcgcgaccgttctgctggcggccaccacggcggcggccttcatcctggcggtgcgcctgcggttccgcataatcgccttcctgggcatcatcggcggttttctgaccccggtcatcctgtccaccggccaggaccatacggcctccctgttcctgtacatgaccatcctgaacgccgggttgctcgccgtcgtagccgcaaccaggtggacaggagccggaggaaccggactggctgcctataccatcctgctgatgggctggtttgacgaatacggcggcccctcccatattctcgccgtcgtcatcctgtccatctgcaccctgctcctgtacgggggctacggcctttatgccggcacacggcaggctgaaccggaccggaagggaggtcccttcctgctggccttctgcgccattgcggtcacctgcctgacggcattccgccttcaggcggagtgcagcttccggttcctttccccttcctcccacctgcttctcctgctggcgggcatgctccccatgatcgccctgctcccgctggcccgcgccaaaagcacgtattggtcctgctttcttcccatggggcttttcaccattttctatttttaccagtcttccgcggaagaagcctcgcaatctgccctctggatatcctcccagctccagggccttttctgcctgttcatgattccggcgtcttatgcggtgctgtccgcacgcacgccttccggaggggcctacctggcggagcttcagcccggcgtcaggatttcctgcttcgccacggcggctctcgcgtggctgctggtcatgcacccgctttcaccttcccccttttacgttttcctgacggcggccacgttctgcggaatggcggcatggcaccggagagggcaggccctgatggccgcggcggccgggtacacgattgcggcgtcctatcaggacatccaccctgccggttccgcggtgattttcctggcgatcttcctgctgcccctgctgctggtccggcggttccgcagcggcttgctggcctggagcgcctccgccctggcattccccctcttctacctttcctggtggctcttcggaacggcccaccatccggaggccacccatttatgggattccaccgtcgcgcttgcctgtgcggcgcctccgctgctggcggccctggccctgcggcggctaccggaggaaacgcttttgaagcgttccgccatcctctgcttttattatggagcagccatcggcatgctgacgctggccatcggcctccaatggacgggcgcccccctgaccgtagcctggtccctggaagggctggcccttctgctgctgtgcggcaaatttcccctgcccagactggcctggacgggatttttcctgctggccttcctgttcgtccgcaacggcctgtcgcaagccttcgtgcaacttgaccctgccggaatgcaggccctgcgcacgatgttcgccaccatggttttctgctgcatggccggagcctggtgggtccagaagaaagtgacgccacgcctgccggggggccgcagctccggcctccgcgttcttgtcgcggccctgaatattttcggggccatcctgcttttcatctggatgaatacggaaatatcctgcggcttcgccgcgccgggagaccgtccgctgatgatccagttcgggagcagcgtggcgcaggacctcaccatttccattgcctggagcctctttgccctgggcctgatcgccacggggtttgacatcaggtcttccagggtgcgcatggcgggactcgccctgctgggcatcaccctgctgaaagtcgtctgttatgacatttccagcctcgggcaactgtaccgcgtgggagccctggtggggctggccgccatcgtgctcatctcctccttcctgtaccagaagttcaccatgaagctgaggaacaaaaagaagagccagggagaggccccgaaaagttagcgtcatctcactttggaagacaaatttgaccattgcatcacttgaagggcggttcataatgcggaacatgctccggcgcattctgattccttttctgtgtcttctgggcctgttctgcactcttcaggcccaggacgcccccgccctgaaaatcgcgaccctgcacccaattctgggggatatggcccgcgccatcggcggcagccacgtgcaggtggcggacctgctgcgccccaacggcaacctgcacagctttgaacccgctccgcaggatatcgccgccgcagggcaggcgcgcctggttctggcctccggcaagaatctggagccgtaccttcccaagttgaaagacgcgctgggcggcagggcgcaaattctggacctgggggcctccattccggacgttcccgtggcggcggacaccgcagaccatgaccatgggcacgacggggactgctgcgcccacggccccaacgatccccactggtggcacaccccggccaatatgaaacgcgccgcccgcgccctggccgccgcgctcacgcggatggacccggcccatgagcaggattacaaggccggactggcccggtggaacagaaaaatggaccagctttcctcctgggccaggaaggagcttgcggacattccggaagcggaccgcatcctggtgacggggcacgcggccatgaaccatttctgcaaggaattcggcttccgcagcatcagcatccagggggtgagccgtgaagacgaaggcaattccgcccagctggcctccacgctgaagaagctgcgcgcagccggggtaaaggccctgttcccggaatattcctccaaccccaagagcctcacggagatcgccaaatccctgaacatccccgttgccaagccgatcaataccgacgggctggctccggacggccatacgttcgagtccatgttcaagcaaaacgtcggcatcatcaaggaagccctttccccgtcccccaggccatgaccagcacacccctgcgccagtttttccctactctgggagtcgtcatcctgctggggttcttcctttataacatgacggcaggcacccccggagcacaggaagcggacctctcctcccccgcggcgcaggccgcggacgttcccacggtcatcacggtcaggtgcgcccaccgtccggaatttctttccatctcccatggaggccgtgtcctctggcaatccgggacgcccggcctgcatgaagaagtggaatgcggccttccgctggaagacggctccgtgacgctcaccgtttccgcccgctggccggaaggcacgccggacacccccgttacgctggaactggaaccggagggcaggccgtcctcctccgccacccgctggtccttcggcccttccctgaacgacagctacttcttctcatggaaataaacagtccagccccccactgcgcccaggaccacatctgctggggcgcgcatgccagccacccggaccgccaccggctggaagtgcggaacctcagcgtgtattacgggagccttcttgccctggacggcatcagcttttccatcacctgcggccacacgctggccctgatgggccccaacggcgcgggaaaatccacgctgatcaaggccttggccggactgctccgtcctgattccggggaaatcctgtggaacggcagccctcttcacgatacgccgggagaaatcgcctacctgccccagcgttccgacgtggactggtcctttcccatcaccgtccgcgcgctggtggaaatgggccgctatccgtccctgggactgtggaaaaaattcgggcgccatgaccgggacatcgtagaaaaatcccttcacgcgctgggcatggaatccctggcggaccgccagatttcagaactttccggagggcagcagcagcgggcattcctggcgcgcgccctggcgcaggaagcccacgtcctgctgctggacgaacccttcacagggctggacgccccggcctgccagtccctggggcggctgctggattccctggcggcggaaggacggctggtcatcgcctcccatcacgacctgaacacggcggcggacatttttgacaccatcctgctgatgaatcgcgagctggtcgccttcggccccccgggggaagtgcttgctccctcacgcatccgggagacgtatggaatggaacctcaaccggaaacccaagtttcatgatggacgactttcttcaattcctccgcgaacccatcgcgcagcgctccctgctggcatgcgtcatgatcggcttcgccaacggcttcgtcagcgggctggtcatcctgaaaaaatcggctctccagatcggcacgctctcctgcgccctgctgccgggcatagcggtggcggtgctcctcttcggcctcacccgctggagcctcctgacgggggccgtggtggccgccctgctggtgggcctgggttccctattcgtctcccgcacgtcccggctgaaccaggataccgccctgtccatcctgcacaccacggccttcgccgcgggtttcatcgtactagtgcggctgggcctgcaacagaaaattgacgactggctgttcggctccatcatgagcctgtccgactccgacctgtggatcgccttcgccatcagttccgtcagcgtcctgatcctgcttctcttccgccgccccatcctgatctacctctttgacccggacatcgccaccacgctgggcattccctcccgcctcatcagctacggcatcttcaccctcatcatcctggtgctcgtctcttccctccaggccgtgggggcgttcctgacgctggggcttctcgtcggtcccgccgccacggtgtacatgctcaccaacaagccttcccacctcttctgggggggcggaatcatcggtggactgggctctttgctggccttttacctgtccttcccgctgggctggcacctgggcgcaaccatcattctggtgctgggaaccttcttctgcgcagcctacttgtattcatcacggtgcgggcttctaaaacagcgcagaaagaattcttcctccatacaataacaaggcccgttttcatgacaatccatgacacgcagactactagtccgccgtgggggtcgccattataatgcgggttgtgaaaaaatgtgagatatgctctgcaccggcaacggtgttcctgacacagatcatcaacgggaaatccaccaaattctgcctctgcgccaaatgcgcccaggagcggggcctgctggacccggacgcctttgatctggcggagaaactgttcccgaaccttcagggccagttcggcaaggaaggcgcggcggaccccgccgcccccattccggccctgcagtccctaccgctcacaagctgcccgatctgctccttcacccttcaggattacaaaaatgtaggacgcctgggctgcagtgaatgctacaacgtctttgaagaagagatactccctcttctcacccagattcagcctgattcccaccatcacggaaaaacgcccgaacgggcggaaaagcgcgaaacggaaacccataccatcagtgatctggaacaacaactttccctggcagtggcaagagaggattatgaacgcgcggccaagctccgcgatcaaatcaagcaattgcgcacgccgaccaattaacgtacatgctctttgacgacttactaaacaaccccgccaaatggatggtggaatcacgggatgaacacgacatcgttctcacctcccgcatccgcctggcacgcaatctgaccgccaccccttttcccggctgggccacgcgccagcagagggaggaaacgctgaagctcacctccggtgaagcgcgccaaatccccgtcatgaagggaggctattacgcggaactctccggactcacccagcagcaaaaacagctgctggtggaacgccacctcatttcccgggaactggccgcgcgctcggaaggctgcgccgttctcatctcacgcagccagaacgccagcatcctcttcaatgaggaggaccacctgcgccttcagtacatcctgcccggcatccagcttaaaaaagcatggggagccatctccaaaatagactccgaactggaagccaggctcccgtacgcctacaacacgcggctgggctacctcaccgcctgccccaccaacctgggcacgggcatgagggcctccgtgatgatgcacctgccgggcctcgtcatctccgaacagatgcaacaggtcgtccaggcggccgtgcagctcaacatcactgtccgcggcctgtacggagaagggacggaagccaccggcaacctcttccagatttccaaccagaccacgctgggagacagcgaggaccagatcgtggaacgcatgacccgcttcacctccgacctggcccaccaggaatggaacgcccgcaggcggctgctccaggcttcctcgctccaggtaaaagaccgcgtttcccgcgcctacggcctcctgaccaacgccaccctgctatccacgcaggaggcgctggcgctgctctccttcctccggatgggagcatccctggacatcttttcccaccaggcattaaaaaacgtcaataaaaccatactgaacattcagccggcccacctggcccgcctgtccactacggaccagacaactcccgaagacagggaccagatccgtgcggacattatccggaaggaactttccggaaactgatgcaacaacaaaacttctttacaatacatgaacaattttacgcctagggcgcaacaagtgctggcgcatgcgcgccgggaagcggaccgcttcaatcatcattacatagggaccgaacacctgctcctcgggctgctcaagctgggcaagggcgtagccgtcaccatcctggaaaacctgggggtggagcttaccgccgtgcgcaggcaggtggaggaacaaataggccggggcacggagccccaggcggagggcaacatcccgtacacccccagagtccgcaaggtcctggcgatggccaaccgggaagcccaggaactcaaccacacgtatgtgggcacggagcacctgctcctgggcctcatccgggacggagacggcgtggccggacagattctgcgccacttcggcgtggatttggaacaggcgcggcgcgagctgctggacgtactgacgcccaaataccagatggatgcggatgaagacaacatcatcccggacgacgatgacgacgaggaggaaaatgaatcccccgccatcccgacggacgagccttcctccccctcctactccaggcagcagaaatccaagacccccgcgctccaggcctttggccgggacatgacccagctggcccgggacggcaagctggatcccgtcatcggccgcgcctcggaaattgatcgcgtcatccagattctgtgccggaggaacaaaaacaaccccgtcctgctcggtgaagccggggtgggcaaaaccgccatcgtggaagggctggcccaggaaatagcccagggccatgttccggagctcctgcgcagcaagagggtcatctccctggacctggcgctgatggtggccggcaccaaataccgcggccagtttgaggaacggctcaaggccgtaatggatgaaatacgccgggaaggcaatgtcatccttttcattgatgaactgcacaccattgtaggcgccggatccgcggaaggctccatggacgcctccaacatcatcaagcccgccctctcccggggtgagctccaggccataggcgccaccacgctcaacgaatacaggaaacacattgagaaggacgccgccctggaacgccgcttccagcaggtgcaggtaggggaaccctccgtggaggacaccatccagattcttgccggcatccagcccaagtatgaggaacatcacaaggtgcattatacgaaggaagccgttgaagccgcagccaggctctcccaccgctatctgacgggccgcttcctgccggacaaggccattgacatcctggatgaagcaggggcgcgcaagcgcgtctcccagatgacccgcccggaccacatcagcgacatggaaacccgcattgcggaaatcaaggaacgcaaggacaaggctgtggaaacccagctttttgaggaagcagcccgcctgcgcgacgaggaaaaacaagccagggcggaacttcagaacatgctggaaacctggcgcaattcctatgagaccaattacgttcccgtgacggatgaagacgtgatgagcgtgctcgccaaatggacgggcatcccgctggcccggatggaggaaaaggaaaccgccaaacttctgcggatggaagaagagttaaaaagcaaagtcatcggccaggacgaggcggcctccgctatcgcccgcgccctgcggcgcagccgcgcggacatcaaggacccgcgccgcccgatcggctcattcctcttcctgggtcccaccggcgtgggtaaaacctatctggcccgcaatctggcggaaatcatgttcggcaccgcggacgccctgattcaggtggacatgagcgagtacatggaaaaacacaccacgtcccgtctcatcggttctcctcccggctacgtaggccatgacgaaggcggccagctcacggaagccgtccggcgcaggccctactccgtcatcctctttgatgaagtggaaaaggcccatccggacgtcatgaacctgcttctccagattctggaagaaggaagcgtgacggactccctgggacgcaagatcaacttccgcaacaccatcatcatcctgacctccaacgtgggggccgcctccgccaagcggcagagcgccatgggcttcggggccatggccgccgacaacgcggactacgccgccatgaagggaaagattctggaagaagcgcgcaggcaattccgcccggaattcctgaaccgctttgatgacatttccgtcttccgcatgctggaacgggatgacctggaacgcatcgtgcatctggaagcggacaagctcatctcccgtctcaagaccaagaatatcacgctggccctgagcccggaagccctgagcctgatcatcaagaacggctacgacccgcagtacggcgcacgcccgatgcgccgcgccatcgaacgcctgctggaagacccgctggcggaatccctgctgaggggagacgtgaaacccggcgataaaattgaagccgtggaaacggacggaacggagacgctcaccttcctgcacatcaaggataaaaccccggcaaagcccaaaacgccgcgcaaaagggctccacggaagcccaaggcggaataaaagctttccggtttttcaaccgaggcccctgcatgctggcatgcaggggctttttctttgacggattacgcaaatatccgtttttcgctgaaagaaccatttaccagcctgtgatatattataaatatgaccttttacttctcaaaaattctattccttttcatgctgacaaatctgtttgtcttcgcagaagatatacagaaaaacagggagcgggaagcagcgcgttcagtaatcatgcggaccgttccgtccctggccaaagccccggaaaaactgcaattggaaattattgaaaaagaagacgggcacgatgtttttgaaacgaaggcctccggcggaatactgaatatccggggaagcagcggtacagccctctgccggggattctatgattttctgaagacaaaccgtctgggaatggtctcctgggataataaagatatccgctggccggcgcaactgccggacgccgcgccgcgccgcatcgtttcccctttccgcaaccactattacctcaatgtggtcacttatggctatacgatgccttactggacctgggaacgctgggaaaaagaaatagattggatggctctgcacggcatagatatgcctctggccctggttgccacggagggaatcgccatacgggtatggaaacggctgggactgacggagaaagaaatagaagaattctatacagggccggcacacctcccctggcagcggatggggaacatcgtcaatcatgacggccccctgcccgccagctggcacaaggaacaaatcgccctgcagcaccgcatcctgcacaggatgaaatccctgggcatgacccccatttgtcctgctttttccggtttcgttccccggggaatcctccgcctttatccggaagcgaagcttcaccggctggggtggggaggctggcctcaaaaaaaccacgcccattttctttctccggaagacccccttttccttaaaataggacgcctgtacatgcaggaatggcagaaggaattcgggagaaacacctattttcttgcagactcctttaatgaaatggaacttcctgaaaacaaaggaggagccgaagcccgcaacaacatgctcagttccctcggagaacaaatttaccgctccatttcctccaccaacccggatgcggtatgggtcatgcagggatggatgttcggataccagcgcaatatctggaacgcagataccctgaaggctttgctcagcaaggttccggatgataagatgctccttctggacctggcggcggattacaacaagaccttctggcgcaacggcatgaactgggacgtcttcaaaggttttttcaataaaccgtgggtttacagcgtggttcccaacatgggcggcaaatgcgccatgaccggggtaatggatttttacgccaacggccatctggaagccttgaactcttcatccagggggcatctctccggaatgggcatggccccggaagggatagaaaacaatgacgttatctacgaactggttacggacgccgcatggagggaccgccaggaggacgtggaacaatatctggaaaattattgccgtgcccgatacggaaattatccggacagcatgaaggaagcctggaatctgttccgccgcacagcctattccaacttaaaggaccatccccgtttcaactggcaaatgaaacccggcacccgcggctgttccgtaaacacaagcgaagattttctgaaaggcctttccctgttcgtcaacactcgcggcctggaacagtcccccctgttccgccaggatgccgttgagatgaccgcccattaccttggcatacgcatgaatgaagccatcctggccgctctggaagccctggatgaacaagacatggagaatacggaaaaatgcatggaatatttccgcaaatacgcccttcgggcggattcctttctggaaggacaccccacctggaggctgtcgcgctggttatcatttgcccggtctcacggaacttctccggaggaaaaaaacaagtatgaacaaaacgccagaaggctggtgaccagatgggggcctcccgtagacgactacgccgccaaaatatggagcggccttatcagggactactatctgccgcgctgggaacactttattcaaagccgtctttccgaaaaaaatccggatatgggagcatgggaggaaaaatgggtccgttccactggcgtaagcgcggcgcacgctcccggagatctggtcaacgcctgccgccaggctatccgggaggcgccgcccctgccttcttccctgaaaagaaaagcagccgggtcaattataggaaactggacctccgcaacggtatccacggaatggagttatctggactggcccgtttcttccgctgatcttgaaaaactccggggggtgcgcttcgtcttcacttccggcagccatgccctggaaatagacggcgtcgaactcctggaaaacggcaaaataatcgcccgcgaccagcacgccggattggcaggcaagccttcccgcgggaatttctacaaactttcccttcccaagggaatccatgccaacaacggatgttccctcagagccagggtccgctccgtgggaggaaaatcttccaatggaaaattggaactgattaaagaatgaacggcttgaatttcattcgctttccggaaggagcctcatgaatccgtacccgtgccgtttcctgaccgaaccaggaaacggcacgcccggcgtccctcggaagccccgcacagaacaatcggacggaaagttacatttcgaaccggtgcaggttttccacatgggaatatcccatcttcctgagcgtttccagcgccttgtccgccctcttgcccgtacggcaatacagcagaatcacggcgtttttatccggaagaagctgcggagcccgttgttccacctcatctgccggaatattcaaggctccctccttatgtcccgtgcggtactcatccggagttcggacatccaccagcacaatagggcgcgccatgccgctttccggagacaccaccatggcggcgggaacaggggcgcgttccgcattcctgcctttcagccagacgaagagggctgtcagcccggtcaccatgaccacatacaaaaccacgtttttcacgcggccacttcactaaaccgcggcgaagtaatcaagagaaaataccgcccagcccccgcacgcaggcgtcatctgccctccggcccgctccggcggccccgttccacgggaaaataacgctccgtccgcaaaagcgggaagggaaagttctttcccttcccccccatattcggaaaggccggagaattgtccccctacccctcatcatcaatcaccacagcctgggaggcgaatccaaaagcggggcttccccattccactacatccccgggttttaaatataccggaggcttcatccccatccccacgcctcccggagttccggtggaaaccacatctccgggccataaggtcatgaaccgggaaacataggcaatcaggcgcggaacaggccagatcaagccgtccgtattgccgctttggcgcacttccccgttcaccttcaattccaggggaatgccggctccgtccccaagttcatcagcggaaatgaacgtggggcccattggggcaaagctgtcataactctttcccttggtccactgtccgccatgttccagctggttggccctttccgaatagtcgcacatcagcgtatagccgctgatagcccgcgcggcctcctccggggaagcgtttttcagcacctccttaatcactacggccaattcaatctcataatccagcttgtcgcagccgggcggatacaaaacgacatcgctgcaggaagtaatggcggaaggcgatttcaggaaaacagccggttcctgtacggaatccccgtcaaactccttcgcatggtctgcatagctctttcccaggcacaccagcttggaaggggaacagggcagcgcggtatcaatcgtccattcagggtcaacagctttggcggcggtattatccagaaacgcggcaatgcgctttatttcctccccgcaggatcccgtttccccgcaaatgcaggcatccacctcggcaagcacggagtccgccgccaggtattctccgcggctttcgctccacagagccatgacgcgctccgcccggtcattcaggtaaaatctgatcttcacccttccatcctacaaagctcctccttttaggcaaagggaggttccgtcattctttgctccggaggttctcttccgccgcccggacgctctgtgaaagcatgcagcgcgtagggcttgcgttaccggagcaaaacattatcatgccaccgcttaacatcattaacctatgtccgatcaaatctatttttttgacactaccctgcgcgatggagaacaatgccccggagcatccatgaacctacgcgaaaagctggaagtggcgcggcaaatggaacggctgggcatggacgtgattgaagccggctttccctgcatctccgacggcgactttgaagccgtgcacaccatcgcccgcgaaatcaaaaaatgccgcatcgcagggctggcccgctgcgtgaaggcggatattgaagcggcggccagggccctggaacccgccggggaacgcgcccgcatccacatcttcctggcaaccagcaagctgcacatgcagttcaaattgaaaaaagcggaatccgaaattctgcgcatggcggcggaaggcgtatcctatgccaagcaattcgtgcaggatgtggaattttccccggaggacgcttcccgcacagacctggattttctgaccaaagtcgtggaaacagtcatcgacgccggcgccacgaccgtcaacattccggatactgtgggctacactactccggacgaattctaccgcatcatccgccacctgaaagaaaatgtgccgaacatcggcaaagccgtcatctccgtgcattgccacaatgaccttgggctggccgtagccaactccctggcagccgtccgcgccggagcccgccaggtggaaggaaccattaacggcatcggcgaacgcgccggaaacgtggctctggaagaagtcatcatggccctgcgcacccgcgccgggcaattcggagacgtcacggacaacatcaacacgaaggaaatcgtccgcacttcccgcatcgtggcccgcatgagcggcatgcaggtgcagcggtccaaagccatcgtgggggaaaacgctttcgcccactcttcaggcatccaccagcacggcatcctcaactgccgggaaacctatgaagtcatggatccgcaggcggtcggctggggcgccacggaactcccgctcaccaagcattccgggcgcgctgccgtcaaatccaggctggaacagctgggccatgtcctcacggaagaggaagtcaacaccgtctttgaacgcttcaagaaagtgggcgactccaaaaaattcgtttatgatgatgatctttccgccattgtggacgactccctgcatgcctccaccggcctatgggaactggacttcctgcaattcgtggcgggcagccacgcgcgtcccacggctacggtgggactgctcaaggaaggcaagaaatttgaagacagctctacaggcaacggcgccgtggatgccgtcatcaaggctattgagcgcatcactaagcgcaaaggcacgctgaaaggctacagcgtcaacgccgcttccgaagggaaggacgctctgggagaagtcacggttcatgtggacttcggccagcccaagcccatcgtgggcaagggagcctccacggacgtcattgaagcctccgcccgggcctacctgaacgcggtcaaccgctccatccgcatggaaaacatgcctcagcccaacaatctggacgcaggagccatctgacccggagcgccccggtacgcatgcgcgaacggggcgcacctccgcacggcgtccgcaggacagctcctatggcttgcttttctcctgcttccgtgccataaattccaagccttttacaccgtacaaccccatgaaagcaacactactccttctctgcctggcgtgcagcgcgctggcagctcctccaaccaaaaaacagccggagccggccaaaccgctgcctccgctggaaaaagccaccattgccattgacggccacccggaaagcgtggctgcggacgcggagggcaacatctacttcacctgcatcggcgccaaactggcgcccacggaaaaggacaaggacggctacctgggcgttatcccgcacggctccacggaacctaaaaagatcacggacgtggacaccctggacgctcccaaggggctcctgtaccaggacggcttcctgtactgcacggatgtggacatggtctacaagatagacgccaaaaccggcaccattgaggggtatgtggacctgtccccctcccgcatgaaattcctcaacgacctggcgttcatcaacggcaggctcatggtctcctccacggataccgaccagattttctacgtggacacgaacaccagttcctacggggagctggtcaccaagcagcccatctacaagccgaacggcctggcctgggacccggaaagaaaagtcatctacctctgcgaatacgccacggatgaaaaaggcaagcccagcggccgcctgctctccatcaaccccgtctcccgggaagtcacggaactctccaaggaacgggggcaatacgacggcctggtgtaccgtgacaacgccctttactacagcgactggtccaaggacaaaaaaccggaagccatccgcaggctggacctgaaaacggggcgttccgcgccggcagccaccggtcccattgaaggcgcggcggactttatcctgtatgactccatgatcgtggttccgggcatggcggaaaagaaaatccacatcatgcccatcggcgggaaaaaataaaccgggcggttccgctcttcaactcccctctccgggccgccggcgggcatttcccgcgctggcggcctttttcaatttacggcttgaagtacacgtggggatgcgcttagttaatggggatatgagcaagatttcagaccaaatcatggaagggatgaaaaccgccatgagagcaaaagactccgtcaccctcaacacgctgcgcgccctcaagacggctctgacgaacacggccatcgccaagggaggcctgggaacccagttggaggaagcggaagaactggccgtggtccgcaagcaaatcaagcagcgcgaagactctacggaacaattccgctccgccggacgcccggaactggccgacaaggaagaagcggaaatcgccgtcctcaagcaattcatgcctgctgaactcaccgcagaggaaacggaggccatgctggaagccgtcctgaaggaaacgggagcctccaccaaaaaagacatgggacaggtcatgaaactcatgcaggaacgcaccgccggcagggtcaacggcaaggaactggcccgcatggtgtcagccagactatcatgaaatgctgtgccgccatcattgtagcggccgggtcctcccggcgcgccggatttgacaagctgctggcccccctgcacggcgtcaaggtgctggaacgcagcatccgggcctttgccaactgccgggaaatcacggaaatcgtggtcgtctgcccggaagagcgcttccgcgccattgatgctgcggacctggagacggaaatacccgtcacccgcgtggacggaggagcggaacggcatgaatccgttcagaacggcctggcagcccttctctacacgccggaacttgtggccgtgcacgacggagcgcgcccccttatcacggtagagcaaatctcccgctgcatccagactgccagggaatgcggagcggccgcttccgcgcatcccgtgacggacaccttgaagcgcgcggacgaagaacgcttcaccctgccggagcaggtggaccgggacggcctgtggtgcatggaaaccccgcaggtcttccaatacccgctcctgctggatgcgtatgtggaagtcacggaacggaacatgcaggtgacggatgaagtaaccgccctgcagctcatcggccatcccacgcggctggtgcacaaccatgagccaaatcccaaaatcacctggccggaagatgtctcccgggctgaaacgctgttggaactcaaacacctccgcaaagactcatgaccggccttctgtgtacagaaccccgcgccgtcctcattctgggaacgggctacctgggaaaagcgctggcggagagcctgcggaaagccggtcacacggcccttacggcggacattgacgcacagaaagccatttatgaagcggacgtcacggagagagcctccatgcacagcctggccgcccgcatcccctccccccacatcatcgtcatgtgcgccagcacgcggggaggctcagaggaagcctaccgcagcctctacatccgcggaacgcagaacacgctggaagccttccccggaacgccggtcatcttctgctccagcacctccgtctatggcatcacggacggacgctggatcacagaggaacataacgtctaccccgcctccggaaaaagcggcctcctcattcaggcggaacaggcggttctggccgcgggaggcaccgtcgtccggctgggagctctctacgggccggaccgctgcgtgctcgtctcccaatactgcaagaagggcgcggccctccccggaaacatggacaggtggatcaactacatccaccgggatgacgccgtggccgccctgcacctgctctgcacgctccgggaaccgcccaccggcatctacaacctgacggaccgcacccccatgcagctgggagaaatttactcctacctctccggactgctgggcatgcccgcgccacagcccgaaccgctccaggcggaagcgcgccgcggcttttccagccagagaatctcctgctcccgccttctggccctgggctgggagccgctctacccaagctttgcggacggcgtgcacaacgtgctggaagcgctggaagcggggggagaataaactcccgccgccgcttcttctcttcatgcccaagaaaacgctccgggcaggcatgaaaaagagagagaacaaacgcaggacgcataccggaacaggcgaggcgcccggccagcctccccgccagtctttgactctcccctttcttgacttgccgggcgcgaacaggcaaaatcctgcgcgcaatgcgtatcatcacaggacttcaacccagcggcaagctgcatgtcggcaactacttcggagccatggaaccagccgtccgcatgcaggaacgcggagaatcctactactttctggcggactaccacgccatgagcaccgttcacgacgcggagaccctgcgggaaaactgcaaaaacctggcgacggactttctggccgtgggcctggaccctggaaaatgcgtcttcttccgccagtcctccgtgccggaagtcaatgaactggcctggatactcggcaccgtctgcccggtgggcctgctggaacgctgccactcctacaaggacaaaatcgccaaggggttctcccccagcaacgccctcttcacctaccccgtcctcatggcggcggacatcctgatgtatgactccgacctggtgcccgtaggcaaggaccagaagcaacacctggaagtcacccgcgacctggcaggcaaaatgaacgaacaattcggcgaaggcacctgcaagctgccggatgcgctcattgcggaaagcacggccatcgtgccggggctggacgggcaaaaaatgagcaaaagctacaacaacacgctccccatcttcggtgaggaaaaagccgtccgcaagctcatcatgaaaatccccacggactccacccctgtggaagatcccaaacccacggaaggctccgtcatcctgcagctctacaagctcttcgcctctgcggaaggctatgaagacatggtccgcgacttcaaaaacggaggctgcggctatggcgacttcaaaaaacgcctctttgacgcctactgggaatacttccgtcccgcgcgcgaacgcagggcggaactggaagccaaccaggactacgtgcaccggacgctggaagaaggggcccgcaaggcgcgggaaacggcctccgtagtgctggacagggtgcgccgggccgtgggcctgatctgaaccgggaatggaatgccgggagaaccggggacagcacacgttttttagtggcatggaaaagcacggaatgttatacaggaagatatgaagaatattctggtagccattgatttctccaacgccacggacgccgtcattcatcagatcggcaaactggcttgccccaacgacagcatcatccatctgctccacattgtggaacccagcatctgttatgaagtctccggcgtgctgccggatgaagtgcctgtccccgtgatggaccagacggaggaaaacgaagtcatctccatcgcaaaaaaccatctgcaaaaaacggcggaaaaactctcccggctgacggacgcaaccatcatccaggctgtggaagacgaatttgaaatcagcgaagcggtcatcaactatgctgaaaaacaccacattgacatgatcgtggtgggcaagcacaaccacggcttcctttccaccgtctttctgggcagcgtagccagctccgtcatgcggaaatcccccgtgcccgtgctggtggttcccgtcaccaaggaagagcagtaaaaaccgccatccgcaccagtcccgtcccacttcatgattaccatactctttataggcgatgtggtcggcgaacctggccgcaccgccgtgaagcacatgctgccggaactcaaaaaggagcatggggcggactttgtcatcgtcaacggtgaaaacgcggccgcagggcgcggcattacgccccgtctggcgcaggaactgctgcatgcgggagtggacgtcatcacgacgggggaccatgtatgggaccaggcggaactggctccttggctggactccgaaccgcgcgtgctgcgccccgtcaactacccgcaggggacaccgggacacggaagcgtggtggtggaaacgcccaggggaaaaatagccgtcatgcaggtgcagggacgttccttcatccagccgccgcttgaaaaccccttcctcatctcggaagcggaagccaaaagactcagggaggaagaaggcgtgcaggtcatctttgtggacatgcacgcggaaaccaccagtgaaaaaatctccaccggctacaatctggacggactggtctccgccgtcatcggaacgcacacccacgtgcagacggcggatgaaaccattctggaacacggcaccgcctacctgacggacgccggcatgtgcggccccgccgtcggggtgctgggccgggaacgggaacccattatccaacgcttccgcacctccatgccggccaaattccctgtggcgaactggcccgtgcgcctctgcggagccgtcgtgcaggtggatgaagccaccgggagggccctcaacatcgcccgcatcagcaaaatcgtggaaaaaccggcctcctgaccatgcagactgccaccgccttcctcttatcatgcctgttgacggcgctctgcggatgttccggacacaacggaaacgccgtgagggactaccaaaacatggcccacagggaaggctggcatcggcttcccgcatcctgcttcctcacaccggacggacagccggcgctccagtacagcctgctccggcagcatccctcactcaccctcacggaaaagcgggataaccggcagcccgtcaccctctcctggaacaacggaaaactggccgtagcatgcagaaatacggctgccatcgccatgccctcctgcggacgcatggtcctctttaccgtccggcaggacggcatcgtacgctaccaggataaaaaagacggcatcccccagcaaaacgggggtggatgggacatgctgattgctgtgcatggaaacacctgcctcatctgctggaaccggggcgcaggccttcccgcctcctgccgcccggaacaaacggcttccccccgctattatatcttcacgatggaaaaacggaagggccctctggcacccgtcttctccttaattccccactccggctcaaacacgcagccatgaactatgaagccagattcggcggcataggccgcctgtatggaaggagcgggctggacatcctcaggaactcccgcatggccgtcgtcggcattggcggcgtgggttcctgggcggcggaagccctggcgcggtcgggcgtcggcgccattatcctgatggacctggacgacctctgcatcaccaataccaaccggcaaatccacgctctggaaaccacgatcggacaatccaagacggaagccatggccgcccgcctccggcaaatcaacccggaggcggaaatcatctccatcaacagtttctacacggcctccaatgcggaaaaactgctggagacgaaaccggacgttatcattgacgccattgactccctgattcccaaggcccatcttattgcctcctgctaccgcagcaaacagccgctggtcacctgcggcggcgcgggaggacgcgtcaaccccgcaaaaatagaaataggcgacctctcccgcactaagggagaccccctgctctccagcctgcgctacaagctcaaaaaagactacggcctaccgctgggggaaaaagcccggaaactgaaaatcccctgcgtcttctcccaggaaactcccgtctaccccacctgcgacggagaaacctcctgcacgcgcgacccggaatcccaggggaaaatgggctgtgactccggattcggctccatcacccacatcacgggcaccttcggcttcttcgcggcttccgccgccattcaaacgctcttaaacaagaaaaaaacaccatcacagccatgaacaaactcctgcttcccctgctgggggccgtcctccttcccgcattgacccagtgcaactccctggaaaaagacatcgccggcatcaacgcccgcaatgcggaaatcgcccgcgaacccaggggcaactacttcgtcggccgccgttaccatgtgccggcaacgcgtttctgggggtacctgcgccagccgggccagacctggagaacggcccagctcgtcatcatggatgaaagctcctgccggactccggaccgcctgccggaatacgccgggagcccgcgctacgcctatgataacaactatgaatacagggtctacggcaagtacacgggcaaatacggctacgagcctaactccaacctgaggctgcccatcttcaagccgaccaggtttgaagctgtcagcaccgatcccggctggctcttcaaaccctcggaaaaatatgacaccaaggccgtcaccctgcgcccggccatcatgcccgtggctacctccctcccggtccgctaagaaaatccctcttcaaaaaacggaatcgaaaggataaaaaagaagaaaaagcttgatatcttcgttcctctgcgctaaaaactccccgccttaaggcacccatgctcgggtggcggaattggtagacgcgctagactaaggatctagtgtcgataagacgtaggggttcgagtcccctctcgagcaccatataaccttctttaagttaattacttagagatggttacttgtttttgggagagaggagccaaaaattttattttttgacgaattgggggacattcaggggacatacttgttgtcgaaaagcattgtaaaataagaagaaaatactcttttctctagatgaaaatctacactaatttgtagctgtctacaatgtaatgacgaagaacccaatttcttgggttatcggagatattcaattatctttgctccatgtactcaaatcgtacatagctctctcgaatagatgatagtttccgggtacccatgtggcttggacactcgggaaccaacatgacggaaaagcactaccgggaaggcgttcgtgctgccgaaggcaaagcatggttcaatgtgttgccggaagaaacaggtcatcaacatgctgtttttgttgatctccatcttcagatgtagtaatcgatttctgttgtccgttagtcgccatcgagcgcaggactccttgactctctcaagcgtttcattgggttttctataaacccgggacgtacaaggaatggtggtctagctcctcataccagttctttgagttccacctccagcgagttcgccggggttccacgacaggggcatttttcatattacttaataaggttaattgtcctgcgttcttgatgaaggcaggcactccggcatagccgggaaggagactcgctgagtctcatcacacttgaacgggatatccaaacgagatccctcaactttactttaacaccccttcagcacaagtacctgaaggcaccattttaccaccgaaacctattccagcttcacaatcaacaatgaataattctgctatatatattactgtaggtaatccgtaccaaaattcatcagaagttcctcttacccacgaagacgcaattcatgaattagccaaagatgctttcacgctaaacggtatcacctctcttcccagaatcactgtggacaagatggttttttctgctacttacacattacaaatcgaccctgcattttcgaccattcaagagaaacactccattctcaagcatttggtcgagacactcagtagctcgaccaactggaaggaaaatacgccctatccaaggggactaatatacggaggatactccgacattgaggaagaagaaaaggcatcacgaaagccacgttttagtgaaacgagtatcaggaaaattggttacaaggtacatccaagaaaagattatcagccttattactgcacaggacgattcccggataaattttcctttatctcaccagcaactctggcggaaccagcaaagcctgatacattaactaaacagcttcatctcccggtagaagatgagaaaagcttcgatcaaggccatttttacaactatatgaatatttggataaagacggcgccattatacactgcgagctgaagtggacagtcaacatattctgcaacccgcaaagatcactttaccatcacccggagctttcgacagaatggagtaatacgccagagggagtaatacgttcgttctacaggaatcctgagatcaaagcaaacaaggacaacatcattcccggagacatgaatcaggatatctttatccaagggatgaagaacacatgtgctggagtattgcgaattgcccacgaatctttggttcatgctgttaatgaaactcggatgaaggaattcgtgtgtgatggctatttatcttgggagagctctttgtctagtggtgacatcaagctcgttgagacagactgggcatttccctgcaatgatgctccctgttttatttcaaccttgcgcaaagtgttaaagtcgactgggaaaaaagttacatcccgagattacgggaaaaacaatgctactgacgaacctcgaaatgcggttgtcgcctactgcaaaagaggagtagagctgtctatttacgcagaaagcttgaacatgatccgtgcagagctgcgacaaaaaggaaaaacaggacttaatgcgtacaggataggcggatgttctatggcaacatatgttaatccgcctgtttttgaagcactcatggaaagagttttttctggcaatgaggtcagcacatcatgcattgagtaagataatagacagtatccctgcttttgaatttaaggatccacaggaagatcctagtggattcatcgcttggatgtggcaaagtgagcccagagaaaagcatcaagaaaccgtgcaggaaattatcaaatggtccatatctggatgtgaccttcacactagcagtctgtcgaagaaggcccaaaatttattacgtcgcctcgctgctaaaaaagcacttcttagttagatcaaaaacattctatcctctcttctaatcctgagctcaataactgtaagacatagccttccggggcaggcatacgcctcaacggttcaatgctacgatacgggtctcatggttacagccgagcgaagccaccatcccaagaacccatgaataattctcccatcgacgtattcattgacctgccttcctccccggggcctgtaccagcaggcaggctatgggcgcactttcaccacgtcacgcaacacgcttttcacgtaacgcacccatcagaagataaaaaaattgcatgcccccgccaggaactcacacgaaagcgcaagttcctggcggctatagctgattatccaaacgccggagttagtattctggccggggcagcagtgccttcttcctctcgcggctgaaccggagtcaccataggcacttcgacaggaggttgcgccggggcagcggttgcctcgtctgcgacagcagactcgacaagctcttctgaccttgccttgtcgactttttcgctgtgtaagacgacaagcgctccctggcgcccttgacaagtcctcaggatgacttgacgcctttatagacacctccctccatcttatggcttacatggcgtgtgacctcacacgcaataagagccatcacagaggcagtgacgatactggcttcgacaacattcgtgatgctgtccgtaacaggatattcggatttcgtattcatgatcttggataaatgattcgagtataattactctcatcaagtatacatagcacgaaaacgcctgtaatttcacaaataaaaagccccggctcgaaagtcggggctgctctatgaatatataggcaatggaagttattcttcgtcgtcaacaacggtgagtccaagcccatgaggtcctgccggatttccatccggaacagggtaagccgccacagcctttggcgtcggcgcaggcgacatcttatcctccggttcttcctcctcaaggccggccagggcctcttcatcggtcggattgcggaactccttgagcaggtcgcgcatgatcttcacacggtaagcgcaaggcattccgaggatgttcgtattgcctaccgtgatgatgcagccgtgtttggcgacaaaacggatatcctgggcgtactcccgcagagcgtttcatccagccgccttacctgatgggaaagactgtagatggacataaattaacacaatatgctgatattgtatcaattatatataacgcgcagaatttccgttttacaaagaggtcaattgggccgtccattgtgtgatccgtatgacagaaatgcattgtgaaataagggtaaaaacggcctgaaagtgtacacactttgtacccaggttggggtcgtttcatgaaattgaccacttccccatcaaaaacaagaaaccctctccaagctatttacttgaagatggttattgttggtgtacctgaaagaattcgactctgtactcctttcagaccagagtttacttggcagatttccgaattgacctatctgcgaggtgaagctgcagaggaaacgaattaaagagtatcgccgaacgcttctctgaaatttgttttcacaggagccttgattcctccggggtttggttgggtaatctggttgttggatggtggggtataagtacctgtatgttgggcaatcatattcttcaatgtcttattcacagaatgctgtgaagcagcactcagcaatgaaaaatccggagtccatgttccgtcagattgtttggtaaaatggccgcgaacaaggatgccgctccccacaagacgagaatcaagcataatggtttgagcgatatcagcttcatgtacgatatctacgaggcgttcttcatgaataattccaattttaccgggaaggccaatgggattgactgtatagcctttgagtctggaggaagatatgtgtctaaggtgtctaagcacatattgaacagtggctcctcccagagaatgcccgacaagaataaactggtgtttgggatattttcccagaagttcgcgagtaactcgtaaggctactataaagcgccccatgtgttccagctgctcatcagaaaaaatcatttgcccatcgtccagggcatcggcaagagtcatgctgcccctgaaaagaatatagacagtattcgttatttcaaggttgccgggatagggggaattcagagaacgattcgccttggccatcaaggcataggtcaatccctcatcgttcaggttcggtttttccagaaggaaatatcccttgtcctgcagacgagttaaatcattgccccaagcgttcgcatccagatagacaaaggaagccatttccgtcatatcaatcaattcctgccgctcctcgtaaggaagagtatgaaagagggtcatggagttccagggcgatttgtctactacttcctgttcaaagagtttgataaaaactccaaagacgatcaacatcataggaatgtacaggaaaaatgcgacaaacggcccgaagctctttgatatgatctggtaaggcagctttaagatcgtaaatgcggttgacccgaaaaatttgattaatcgggcaaatacggcaaaaatacccatagcattcaattatctgcttcgtccctcttgttcccggctgcgttccttctcttcgaaacgtccctgcttttcttcccgaaagcgatcttgttgaaaccgttcacgttccttttggcgttccttctcggcttcctcatgctgtctggctctctctttttcacgacattcctcctgccactgacgatattgctcttcctttgcctcttgagtcttacgttgttcctcctcccatctctgttgttccgtgtggtcgtcttcccggccctggttcatttcctttcgattttccatgctctcttgccgggctttttgctccatggctttggcacgatccagttccatttgggcttcatgttcctcctgtttggccttttccacctcattattcagttcttcaagctttttctgatgttcttcgaggcgttcgttgaagggacgtccatcatccggaaaattatcctgatgtgcattgcgtttagattcgatatttttgcgtttttcttcgcattcacgtaaacgatcttctgcctgttctctcatttccatggctgtctgtttattttcttgtgaaattgttgctaaaataggggttggaggaagcttttccagagaacatgtgatcgctgtaataagtaaggcgttccgccagaatgggaggaataccctggacgaaagtgagcacagcttcgcgattcaggcgacgaacttcgtctggattgagaaggtttcgtgtaatttccgaaaatgattcgctttcactcttatttttgacaaattccgtaaacttgccgctttgactgtgagaaacggatttgctggttatggtggccgcccccagcatctcggagatatacttggccgtttcgtgatcgttaataccgaaaaactgctgaatcttggcatttgccagaaaggtaggccagtcgtgttcatacagtgctttaagctgggaaagatcctgccataccatccagatgctcatgccgtatccggccagcagactcaccgcttgtttcatcatgggcaaagaacccagctgggccatttcgtccagcatgaagagaacagaacatccgtctaccggtttccggctgcacctggtcatcgcggacatggccatcgtgacccacagacgaataaggcgcgaatagcgtaccagatgctgcggaggaataatcatataaatggaaacccctcctatgtttttgagatcggccaggtcatacgtaccgataccaccgtcattcatatcccccagagatttgcaggccagccccgagtccaggaattccgtgtgcttgagggcattggatatgatgctctttaattcttcattgccggtggagaggatttcattgcccgcacggctcagcaaccctcctacagcaaccgtgtcctggcacatggaatccagaatgaaattcccaatgacgtggaaaggttgagccagtaactcccgcacttcggacagatgacgcaagcggtgcggacctttcccgcagataacggcaagaataagtcctctgagcagggtacgggccttgtcatcccagtgcggatccttggcgccggcatctcgcacaatgatagcatcggcaatattggcggcgatatcgcccaattccggattttgggtgagataggtagacgttggtttccgatagtcgacaaggctgtcaagcgggttaatgctgtccgtttcttccgtcatcacatggaaaggatccagacaaatgatttcctgacggaacattttgcggcggaagtcagccgtaatggcgtaattttcccctttcgggtcaatgaccagtacagagccgggatagtgcaacagattcggaactaccagacctacgcccttgccggaacgcgtaggggctactgtaatgatatgaccatctcctgaccaacccaaaagctgattttcatgtccattgctgatcaggctgaacaaaccggacatcagtgaccccatggaagcctcatagccctgacgtatgccggataccagtttttcaggattgaccaaacgtcccagcaccatgcaacgattggccggttcccgttccacaaagtcccgtcgaattcggctgttgataaaacaatccggcgaatgttggaaattggggaaagtaaacaggccttcctctgccaaatcatgagcattcgcccatcgggcactcccgtaacagtctgtatttttattggccatacatgtattatttgctttccgtcactctcttctgtgaaagaatccacagaagaggatcttctacgcgcaaagccggctcctttgtgctgacgccgaagaaaagctttcgagtgaatactttgcaggcttccataatgttcacatcagccgctgccacccaactttccatttcacaactcaccgtttccatttcttcctgatcaagcgagccccggtacgagctatcgcggcataccagacgttcggttgttttcagtctccaacggcctgtgtaattgatgtccgggcatgccaatgcatcaagtttggaaacggcaacagccagcggtactgcaggacatgcacgccccagcttcaagaggagacgatggggttccgttccgttcagaggcggcaaaacgatgttggttgtttccagttcattccgcagtgcttcaacctgcaaaggatccacaagacaaacaatacccgaaagcgctgtcatgagggcgggagaaagcttttcttcggtgacttcggcgaatacgatcaggcgtcccttgtctgactttcttttacgaatcagatacatggaatttttgcttgagccagcatcttgttccataatcgtccagccgcatatctcactaagcttgcgaagttgattgatcacagcgcggatataactgctttttcctgaaccggccgtaccggcaatggctatgatgagcggcttgccctctctgttagccgatatgccccctttacaaatcgggcacgcacggaatgacaggatacggtcgcagatcttgcaggtacttttgttatttctggtgcatgaaatgcttgaaggcgtaccgccgattcccagcttttgcaaaacggaaggggcggggggaggcaatttatctccgcaagaaggtttgaaaaacaacaactccttgtcgttgatttgcttgtaacaatgtgggcaatataattcgccagccatatgtttattctatggaaagagatttgcgattgaaaatcaaatcgtagtgcgagtcttcagatacaaagggcatgaagcaattaccggttgcaaccatgttatccggaatggagactgatgcccgggattgtccggaggcttcaactgccagagctttcttcccatcctgtctggaaagaggaaatacgcgacgagcgcaccgtacctccatggcaggaatgccttttttgctttttacttcaaatacccacccttgaccacgtttagctatccggcagttcaccctgttccctccgcccggagcgggagaatacacgttgcgcggggcagaccagcttgaagaggacgtatgccccacttgcatgaaaacggaaaaataataatccttgtcttccatgacgggaataatgagctcatgtgcttgttcggagccgttacgtttggaagtacgtatctcattggcgttcaagtcatccggattttcaacgaatgatttgtttccatagactatggtcacttcgctgcagccttccggccaggtccattggaggtatattcggcctggatttctgcgcaggcgaagattttgcaatccgccgtgccggcccgtacatatgagagcagtatcacccttgatcaccagaggaatgaggaacttcccgcagagattgatttctcgaagtatggtaacctgggcatccttgtcggtttctccgactgttttgaaacgattggctgttactatgctgcctggggtaatcggcactttgtcggaaaccatccagcgcacttcatcagcgccggaaggcagttcccaatgaatacggatatctgttcccaaacatttgtaattccactggtcaagttccagtctcggcgggggaagttgaggcgtaccggaaccatgggcggttaattcgtgtccgctgccatacaataccagcagatatccgtactcccggccattggtcaatccggtatcatgaaaactgttactgcctccatcgaccggcaggcgtgtgccatcattgatggattcaggttctcccccttcttttcggatgagagtggcagaccacccttccggtaatgcgcaccatgtgagccgggcgctgccatcccccatggaaacatggaaatccgcttccggcagcaccatgcccttgccgcccgcaaggccctttagaatgcgcttgttcactacggcaaaaacggcgtagccatattccacgccaggttttgccagcttgtccgtacaaggagaggccgcaccgccgccaagctcttctccatcatccggactaacgggaatcccattgcgtttgcgacgcagcatgtaattgatcggagtaccgttggcatccggcaggcggtcaagttcatttccttgatggcgagccttgagccagacgatttccagctcttttcctgatgcccgcacactcttgatgaccggaggttccagcgtatccagcaatttggctgttctggcttttcccagttcatccagaagcgcacgggccggcacataatccgggtaggtacgcagaatcccttgtatttctttctgagccgtatccagttcttcactgcttcccttaagactatttccgcatttttccagactttcatacactttccgggcagcatcaaagtaggtgccgcactgacggcattgtgggcttgaagcatgaatgggctttccgcatttcggacacatgatacggaataattcaccgcattgagaacatcggctgctgttggcttcatttctggacttgcacttcgagcactccgtgaattgttcctgccacgggaaaggaaccttgtccttgccctgacaacaccggcggtataccagccactgcgcgtctgcggcatccagcccctcggcgcatagggtatcgtataacctggtgtagtatatgggcgatatggtaccgggtgaaccctccacatagtttggaaaggcagcaaacacacgttcgcaaatttcctgcccccgccatgcgtaatcgtaacgtttctttgattcttcgttcttgaagtatttggcgccaatagtcgtaatctctaccttaatggtattgatcggattattggcggatccacccttgttgggttctctgctcttatccgaattgattttgagcagttgctcgggcgaaagagaattcttgcaattcagatactcataaatactagcttttcccgcagcttccaggcaacatttcaatttctgaatatcgcgagacgcagaaatcaggtatacaggatggccgtttgccggttggggagggaccctgagagctttacatgatttgtcaaccgcctgactgctgatgacaatgcccagttcatcggcaagagaggaaaccgaatctatttccagctgtacattattgcagatgttccggaagattaccctggaaatctgaccgtcgacagcggcgttttgcaggaaatttctgactcgtttttgttcattcttcagggcttcttctgcctgcttttgaagagattgaggatttgaaagaaccttttccatctcgggaacggcttccatccatgtcttcctcaaaacatcatcctgaggggcgctgctccactcggcagtgcattgcttgagcctggccaatgcgttgtcaacattggtctccagaggatcgagggataaattcaggatttcaaagtaatttctttttttcatacccgtttcaacagaaaataaagtgagtggaaaactctcaagagagaagttattcgatggtagctcgctccaactctttcctcatggcgttcagctgttccgccggaattgtacaggccgtctgaacttctcctttgatttcctgaccggaggcaggatcccgtgagaagatggtgagcagcccgctttcatccagcttgaaaacggtttctatgggagactcagccgggagtcccggttgaataggcagatttccttcccagatgagacgagcgtcgttgggatcaattccttctctattgagttttctctcttcttcgggtgtggctggatattcaaccagattatccactacttgtatatgtacggtactttgattgtcttcaatagtataactgggcatgtttgcttcgacaggcaggttggtattccggtaaatgaggttataaatacgcgacaccttatcggagtaacggagtaaaatttgaccgaagctgcggctgcatacattggaacatggagtcagtatgttgctgaccgcttccagggtaaatccgctgtcatccgccaactcctgaagcttcccttccgtttccagcgtaaattcaccggtatcgtctgcttctagagtgaatccatctccaatctgttcgcgcatcagatgagccagtgcggagatagctgcacccttggctaccgattcgtccggatcataggaaatgggagtaatccccaattctctttcaactgcaacggaaacctgaggcatgtaggtactgcctcccaccagaatgatttcatcgattctgtttactccctttccccgggcaatatccagggcgcgtttcgttccactgattgtactttgaagaagggattccgtctctgaatcaaattcttcacgtgtgatgtgggcgtatagtttttcgccttcgaatttataggaaacctgtgcctctgtacgagatgtaagtgttttcttggccttttcagctaataactgcatatcctgactggcggcagggtcagacaagaggtcgattgcgctttccgacgacatctgcaaacggtccaccagcattccttgcatgacttcatcccagttttttccacccaagtgatgattgccatcggtacagactacattcagtcccttgggggaaacattaataatggtcacgtcgaaggttcctccacccaaatcgtagaccagaatattgcgttcttcggcatggtggttttgggtgagtccataggccatggcggcggcagtgggctcattgagtatttccagaacattgaggccggcaatctccccggccgccttggtggcttcgcgctcctgatgggaaaagtaggccggacaggtaataaccacatcctgaatttcctgacccagacgctcggacgcatcattcaccagtttacgcagaatgcaggccgagacctgctccggcctgtaagaaccctttgaacaggaaaagcggtagttctccgaacccatttcgcgtttaatgaaggtacacacttcgccgggactcatggaagcctcctgcttggcttcatcgcctacgacaattcgatcgtcatcgaaccagacaacggaaggcgtcgtgcgttcgccttcactgttcagcaaaacctggggtcggccatccctgcccacatatgccacacagctgtatgttgtgcccagatcaattcccacggctatcctgttcatgatttatgttggttaatcgaccatctccagatcggctacaacttcctccagctttttccgttcttcttcactgaggactccttctacctggaagggcacaacaattttcttgtcattagtaacatcccgggcagtcaattcgagccggccttcaggatccagcgcgaatgttacttcaataggagcccctgcgggcaagccgggagtcaattccatggttgctttaccaagttccaggcaacagtccagatccgcctgttttcccacaatgttattggaatagacgatgagaggcagagtggctgcattagcggcagaaacagggaaagcttgagtattgttacaaggaacttcattctgtttttcgatcaggttgtaacagacaaatttaccttccttgttcttcacccgaataccgatacttttggaagccaccgtaatcatctcggtgttaaccgcagtttcaatcgtttcaggtgccaacgaaaattcgtctgcaactttcttatttgcctcgtcttcgagttttcctgtcggggtatcgggatttttttccttcagatctttaagaaccttttcataaagatccctgatagccttattattcccatagagggcagcgcccttggaaacagcatggttgggctcatacagtttgggctctaccctcaaagtgtccttgtagcggctgttaaccatctccatcacctgcggcatataggtagaaccgccgaccagcaggaattcatctattttttccacacctgttttttcacgagccatggcaatcatggcatccgtgaattctatcgtacggttaagcagaggctgagtcgcttcattgaattcctcccgagtcacactcaccttgctcttgctgccgtcgcagcaggtaatgcgggcagtagctgtttctttctggctgagactcatttttgtcttttccactgtcgtgatcaaggcagccctggtttccgggtcggccatcaggtcacctgcctcggggttttctatgagaagcttttcaagcaacaggtcacgcagagcggcatcccagtcagccccccccagcttgtgatctccatcggagcaaatgacctttactcccttgggagaaatctccacgacggtcacgtcgaacgtaccgccgcccaggtcatagacgatgatctgccttgtctcctgtgtttctccctgatcgtttccggttatccccattccgtaggaaatagctgcggcaatgggctcgtccacaacggccagtacattgagttttgccagttcgccggctgctttcgtggccatgcgttcggcttcattgaaataggcagggcacgtgatgacgacatcctttacttcgtggccgctcatttcagcgcctttcaccatgtatttaagaatgagggaagaaatggattcgggagaatgttccttatccaggaaagttttacgccaggttgttcccatttcacgcttgatcaggtggacaaagttatccggatcggtataggcggattccttggcaccttccccgacgacaataccgccatcttcaaagaagacggcggaagctgtaatggaaccgccgtccgggttattgatgatttcaacattgccgctgtcgcccacatgggaaatggcggaatacgtggtacccagatcgataccgtatactttgattttagtgttttcgctcataatgaaaatatgtgtgatgtcatggaatggatggcagaggaaaaagtgattattccgttgccagtacgtagacggctactttttcggggcggatgacttttccgtctttttcgaatccccagcgcaaagaggcctgaatggttttggccagggaaggatcgtcggtcacaacggtcttgagtacgctgtggcgtttgtgattgaaagcggcccctgcttcggtacgaaaggaatcgatgtcgttgttttcgagcaggtcgcgcaggtcttcggcatgggccaggaccagtttctggagcttggcatagttttccggagtggcttccagagcgctgtaatgttcggcgcttcgttccgcaccgtcgatctcagcaataagatccatcacgatagccttgttgagtttttcatgtatttcacggcggtaggcatcgagttcctgatattgcctgtcaatgatttcctttttggaggcgtcatagcgcattttgctgttgaactcttcctgaaggctggatatttgcgattgcagggtggtcaggatattcagtatgggagtctggtcagctgtcgcctggtgaggggttggctcttcaatgacggactgaggagaagaatccggggcagcttccggagaggattccaattcagggcttgtctccgaatgagtatctgacgcaatttcctccggcacggctgcaggaacagactctggtgaggattccgcttcagcatctgatccggttttgctctccggtgtgaattcctgccgcagctcgacttcggagacggggccttcttccggctccatttcctgtggagattccggttgatcctcctgctccgaagcggtttccggaacggaagaaccttccataccggaattttctattatgatattttcttcagctgattcaaatatgcattcgctgatgcagtcttctggattattctggttagtcatgatggtggtgtatgaattgatggagagggaaagataagtgcgggatcaggcgggaatattttgtaacagccatttggcgagagcgtaaacgccgggacattcgttcaattcctggtcgctggaggagatggaaaaaaatgccgtatttcggaaaagatcggcttttccgagaacatcagcccattgaaggtcatgaaggaaatgacggcaggcggcttgatccgcaccggcatcaagctcacatgctccatcaaagggaagaatcttgccattcgaccggatgaccacggcgcatttaagcttttgcaatcttgctttgtaggccgtgctcatcagttcatgccacttgtcgaaggcttgtgcaaatgaggcgctgccagccgtttcttccaccacaaaaacggcgccttgcaaaagagagtagaagggcatggcatccaacgaattaatagaggccgcatcgcttccttcgaaatcgcaaatttgcaggcaaagcgcaggttgtttgtcgtttctcttgcggctgagcaacaattcgatgtagttgtatctgggttgagtgcaggtggaattgatgcgaggagtatcgtacgcgtaccaccggggtacggatacgtttcccaaggctgaaacaagggctcgcaaaagagaagtccttgttgtatccgaaccggctacacaggtgacaggcagcatgcggaccccattttcattcgtttcttcgctggaaaaacgggaagtttgcagtttaaagaaagatagaggaagaatgaagagtgcggacaggagagcatatgcagccagaacagccagagaaacgatcgggcgcatgatgtagacttccaccatggataccagcctgaccaacaggtttccctgagcagatagctcccggtaaaccttgacaggggcaacgatgctggctttaccggctcccagaagtgtttgcgaccagatttgcagagcagtgttcagtcccttgcttccggcatatttatggcgtgtaatacggttgatcgagagaatattggacagaaccattcccaatacccacagactgtatcctgcgtagaaaccgtactcgatcgagatatctgccactctgcgcgtttcctcctccagataaccggagatgataaaactatacagcaacgaaccaccgataagaagaacaaaggcgagacggccaaagttgatgttggacggtttattcatgtaccgttatcacgtaggagacaaacgtaatgaggaagctggctacatatttcccagttctgcctcaatatctttgattgccgcgttgatcgattccttatcctgtagtgaggaagaggcttccttgcgggcttgcaactcgttacgttttttcagaagatcgtttcgagtattagcgtaactacttgtcgtcttttttatcttattgtatgtcgcttgtttgatcgactgttccgacagtagactttgacggcgctccatagccttatcgggagaccagaaaatacctccttgggtgggatctccggtagtgctgcaggaggagagcaaggaacaagcgacaacaaaaacgcttgttagacagaggtgattgttcgtattcataagaaaggcaggttcattaaatgggaattttttcggaaatataagattcgtgtcttaccgggcctggtggagccaagcccggtaaataatttttgacttttatgcagaaagggtagaaagagctttcttgtgttttgccagagaattgatttcatgactgagcgtgctgatcttgcctcgcagagcgattttttgattgccggaagcattatcggctgcttttcgcgccagggttacttcttcattgagaatagaaatgcgcttatctacttccctcgtcattttttgtgattttgttttgacgtcggaagaggcgagatgccttttttcttttttcagattggcaatagactgagccaattccgcgtttctggatttcgtctgtgcaatgagcttgtccataacctgattgctgtgtctgatctgttcttctacactggcgtattcttttttctgctggacaacgtaatccccccagaaccagccggcgattgcgccaatgctccccccaatggcagctccgataacagtagatttagtatcacctcctatagcctgacctgccagagctcccacaccagctccgccagctgctcctattcccgtagcctgagcatacgtctttgttgtatctgacatgttggcacaggaacccagaccgaaggttagtacgccggcttccatgagtaatacgaatgatttcttaaagtaatgtttgttgttcatgtttattggttgttgctgatagttttctgtcgggagtattcaatgggggtgaaacctttgcttagttcggcaggagtatcctgaatgtcatcagacaatcctgtgatttgaccctccgcatccagcatgacaacggtcttgccatacacatccagccgcgctccgtctgcatccagaaagattcgtctggtatttatttccaacatccggtcttttcttcctacggaggttagcctgacaacgcgtacgggaaatctggcaaggaacccgttcatactttccagaatatcgtcacgggatgttttgatatccaatgacatattaaggatttcttctgaaaacatggtagaaatggattctccctcaggatacctgccgaccagaaggtgcagcatatgataggccttcttttccagtaattcgggggttagtgctttcggttctgctttcggttctgctttcggttctgctttcggttctgctttcggttctgctttcggttctgctttcggtttcggttcagaggaaagtggagttgccgggtcaagaattatgggaatgaactcttctggttcctcgatctgcctgttcagtcgatctgcaatattgtagtggttaaaacagaaaacagcagccatgccggccagaatgaagaacggcagcagaggaccagtttgtgagagataacgagctgtagaatggggcaaaccgcaatggctgcacacatcgcctccatgcgtttgattgcaaatacatttaaccagttgacccgatcccataaattttcttgtcggagaatacgatacagcattcataatgctgattccgtgtttattctttgataaccaaacattaacaggaataacccatgacaatttcatccataattcacggaagaatcagagaaaaaaatccccttaaatccttcccaattatttcaaaaatatcattttgattttttttttgacatcagcattatgaatgaagaactcactgaaaatctcattgcaaaagaattactgaagaaggtcgaccttacacagtgcgatttggctcgtcttgtactagaagctattgaaaatctggggaatttggctcgggggctcaaccgggtagaactgattgttcttctgcgcaacacgttgcaaaaaggagtgtccgttgtaaaatctgccactcatacagtcactttggaagtagcagcctgggcaagtgtcgatgcccggaaggatttgaggccgtcatcgaaaagagacttgcgccatttcgttcgtcggattctacgtgtcgagggtattgcccaattgcctttgcgttccatgactcctattcaatgcaagaaaattttagagacggcattcggttcaagtccaagcagttatacgaagggtcgcgtcattcttcacagcatatttacttacggcattcgccaggaatggtgtgatgtaaacccggtaatccgcattgaagtgcccaagataaaagaaaggtacattgagccgctttccctgaaggatgtggaaaaactgaaggaagcaactacacgccccgaattcaggaatatgcgtttttccttgaatttgatgctttacgccggaatcaggccgactgaggtaagccgtttgcagaaaactgacttccaatgggatgagcgtctggtaatcgtgcggtctaccgtcagtaagactggcggcggcagagccgtacctctaagagggattcacaatatcaggaagaaagaccgctatattcctcgaaattggaaacgcaaatggaaagctttgcgcagagttgccggtttccagagtaactgggtgcccgatatttgtcgccacacgtttgcaagttatcacgctgcttatttccgaaacctgtcggagttacagatggaaatgggacaccgtgacacctcactattgaggagccgctatatggctcctgttctgcgaaaagatgctgctgcgttctggcgagaagctaaatagtaaggcaagggactcggtatgcgaaaccagaacgcaagtgcttttcctggtgcctcacctgatggcggagtacatagaatggagtcatgggtacatgacggcaggtaataagccgtcacatatagatgacgcgaagggaatagatttttcaaatatgattgataaaaaatggatatggaaacattttatcaatcatatcaggacattcatcctatgtcttgattcatgatgccattgatcgtgctcatcaatgaatcaaaaggctccggctcatcaaagagcatggcagaagtctgttcgtagtccctttgccatttttctcgcaattcaagagaatccgggatcagtttcaaatccgagggaagcaatgtatcgtaatcgacccatgtctgccaatggtagagcttgcgtttgtcccttacatcgaagaatagctccttatcaacatatcccgctcggataagggctgccgcatcataatagtggcgtgccagcctggccttgatattccatccttcatgcggacgggtattattctcatggagaatgaaacacttctcccagaatgttcggaaagggctaatcgttcgtacttcagtcgaatctgaaaactccggaaatccttccccaatgtaagaatcgaccatcctggcttcggatggttccgtctgagctctcccgctcaattcgattttgacaaaaggacgaatgtagaggctttcattctgttcgaacaaggatggataatggattaagaggacaaatggatcacgggccgtggacagatcttccaactcgatatgcacattcttgattcccatttctttcatcctctcctccatgagaggcaggagaacatgctccatcatcctccggtagtgggggcgaatcttacgcaatttagcatccctctggctggcggattgaaacgctgtcggcttatcttcttcacccagttcagtgaagaaacggggagataacgcaacatcgatatcctcagagaaacggcgtatgatcttgtacgctttggagagggacgtcccgcctctgaagcatagataaggattcaaggagtcttcccgaaaaaggatattcagaacccggcatacccagaaatccttttcaacaatagaaggaatgatacccagctgctcgccaatgtggcggcacaggaatattcgatcttcggatgggagaccaaggaaatcactcatgggagacagggggcgctatgacttgttgtagaatggggcgcatccatacaggaacaagttccatatcacgagataattgttccttttccgtatcggaaagccgcttggttaattgagtgaccacaaaatcacgatctatcgacttcctgcccagcgagcgcaacgcttgaacgaccaatcccgtaatactccccgacaggcgcatcagtttcggagatgtcttcttgaagcggagtttccatccacctacgtgaaccgttgcagaaggtcgatccgtcaaatactcgtaccgcccggccatttggtcggaaagccacaaagcgttagcggcatggattccattaggtaaaagacgagcttcatttttccttgcccaggctttcgctacctgttccgggtcagttggtacaggcaaattaaatctcttgttggtcgctgggatctcatagataccgggaaggatacgcttgagctcgccatcccttgccatgcgagaaagcgcttgatctactgctgtcctgggccagaacgcaagaaaatcggaagaggtaataacctctccttttgccttctcggaaaatattttttccctcagctggctcctgatgctccccttcatgattaaaaagtattgtttatctgactaaagtcaataaaaaatgctgtttatctgactaaaatgactgaagcaaagatcaattaaccgcatccgggatgatagaaaggtatgcttcagcatccttacgggaaacaccctgcctgtagtgggattcggtcatctgcgttccactatgtcccatccagcgggcaacatccggcaagggatggagagctgcctgataggaagcgaatgagtgtcgcaacgcattctttggtatcgtgatgccggctttggctgccagctggtccaggcgatagccatatctgagttcgtcatcccgggtcattggctcccattctcctgcggccagccatgccttgatttgcggggaggtgggtatgtaacgatccttcgttttccccttgggtcccttcgcgatctcacgcgaaacaaagatatcgtcatgtccatccggtttgtccttgtattgaacaacctctgaacgtcttagcccgcacaatccctgtagaacaatacgggaaagcatggggcggtcatattttaatgccgcctcaagcaatttccggaattcgtccggggtaagaatcccgatggagatgtgatccctggaaggagcgacggtcaaggagaccgggtttttctgaatcagatcgtgctgaatggcccagagaaaaaaggcattcagcgtaccccggtacctgtatttgctggtattcgagaggggctttccctgataccggaacgaatccagtttgtcattgatttcggcggcggtgattgatgacaactcccggttggtccagccttgctgccatttatcgagttcatgaaggacgttcttatggtgggccggctggcattggccccgatccagcatcagctgcctctcctttcgatactgagccatggcgtcatccagagatatacccgtcgagggtggtttcggggtagtaatgtcaacatgatcagcaatgacgcttaattgtgatccgagtaaatccttgatttcctgctctttggtatccgtgagagcatctttccaccacgaaaggagatcagttgcaaatgcctttacctcttccggatcttcatgctggtacaaatattgaagcgtatgttgcagaaggttgttgtccctaccaaattttctccacaagcggatagcgaacatttcgaccacggattctccctctgcaaccatattgaatattgccagggcatcgtcgatatgccccttgtcatacatatcgtagagagcccgggcttcgtcgtaatcgcggaaggtgcgctctttccattctcccgtgtccttgtcaacaaagcggagccgccagactgaagggcgacctttcttctttacttcagtgagtttgactttgctgccatatcggcctttggcatgcttcctcttcatgtaacgagagtaatggtttacagaaaaagcttcaagacgaattaggggacaaactgggggacatattcgtaaattgcttacaatgaataaaagtgtttagattcaggttctagtgggggttcccccgtgaaggttcgagtcccctctcgagcaccatcccttttataccgcaagttgctgttcataagcgcttgcggtttttgtttatcgacaattgcaagacaaaccgcagtatatttatacaacttttatcaacacgaaacgggaatgtgctgcaagaaatgaaaggtcctccctcttgtttactcgctggaaacagttcaggtaaaaaccaatgagggaagctgtgtatttacgatgcccttcaaacgccccctgccatcagggccaggacttccacgcggttcggcatggagcggatggctcccttgcgcgtcgtcacgatggacgcggcggcgttggcgaataaaagcatgtccgccaactgtccgtccgtcaggttttccagccctgtttccagaatccagtccaggcaggaaccaaaaaaggcgtctccggcgcccgtcgtgtcaatggtattgaccttcaggaacgtaggctggtaaaccagcgtgtctccataggaagcccagctcccttccctgccccctgttacgaggatgaggcggagattgctgaattcccttttcagggcatccagcccttccttcatggaggagcacccggtgaggaacagaagttcctccacctctattttcatgacgctgcacgcgccgcagccgtagagcatttgctcccgggccagctccaggctgggccagaggggaggccggaggttggggtcaaaggagacgagggcacccttctcccgggcatggctgacggcatgcctcgtggcgcgccgcacgtcgccgtgcgtcatggagatggtcccgaagtggaatacgcgcgtgttttccaccagcgccatgtccacctccccggaggtcagtttcatgtccgcgccgggattgcggtagaaggaaaaatcacggtcgccatgttcgtcaatctggacgaaggccagggtggtgttgacttcccgggaagagaccagccccgaatcgtcaatgccttcctcctgaagcgtgcgccggagcattttcccgaacatgtcatgccccaccttgccgatgaaggcggtcctgcgccccagccgggacagcatggagaggacattgcagggggctccccccggattggcctggtaaacgggcagttcctgggcgctcactccgcagggggtgaagtccaccagcagttctccgagggctacgacgtcatacatgcttttccaaatgttgaaggtggtccttccggcataaaggaaagccgggagagatagtaaagcatagaacgcgccgcctgttccgggaaaggaaaaagaggttcattccagtcatgccggcaaaggacgtactgccggggtcccatcgcgccctgtggaaaccgtgcccgtaaaaaaatccgggatttttccgtgaacggtcccctgcggcgcgtgatcaatccgccggatagggaaaaagtctggcatatccctaacacccgcctctccggaaatgcccattagtatgagacggcaaataccatacctcatttcaagatgatgaagaaggaactgaaacgacagggcaaggcgaagattccgggggctcccgtcccctatgacaggacaaccattcagccggggatagtccatataggagtgggcaacttccatcgcgcgcatgaagagttttacacgaaccagcttctgggcatgggcggccgtgacgaatggggaatttccggagtggcgctgctgcctcaggacgaacccctttacaaggcgctgaagagccaggacggcctttacacgctgacggtctgcggccgcgacggcaaggacgagttttatgagataggctccctggtggatctggcgtgggggccgaaggatcccgaaaaggtcatcgacaggattgcggacccccgcactaaaatcatcacgctgaccattacggaagggggatacaatctggataaggaaaccggtgagttcatgctcaacagcaaggacgtgaaacatgacctggaacatctcgaccatccccggacggttttcgggttcctggccgccggattgcggaagaggcgcaaggacggcgcaggccccgtaaccgttctatcctgcgacaacctccagcacaatggagacacggcccggaaagcgttcacttcctttatcgaggcccaggatcccgggctggcgcagtgggtgaagaagaacgtgacattccccaacagcatggtggaccgcatcacgcccgccgtcacgccggacgacgtcaagcgactggacgcgcagagcggcgtggaagacgccgcccccgtctattcggaggatttcatccagtgggtgattgaggatgatttcattgccgggcgcccggactgggaaaccgtgggcgtggagtttacggacgatgtttccgcttatgagaatatgaagctcagcctgctgaacgcgtcccactccctgctgtcctaccccgcctttctggccgggtaccgccgggtggacgaggcggtaggggatgaacggttcgcccgctacttgcgccttttcatggaccgggacgcgggcccctacgttccgcctccggggaatacggatttggagctgtacaagaagaccctgctggaacgcttcggcaacaaggcggtgagcgaccagatcagccgcttgtgctttgacggcgtttccaagattcccgtgtatgtgatgcccgttttaacgaagatgatcagggacggcgccgacctggaacgcctggcgtttttcgtggccgcctaccgccattacctgaagcacggaaaggatgaccggggccaggcttatgaagtgaacgagccctggctgaccaaggaggaccggaagctgatcgccagcgacgacccgctggatttcctcgccctctcccccttccggagcacggatttgaaggcggcggacaagttcgtcagccagtacctgggcatggtggagaagcttgaaaaagacggcgtgctctccgttctggaaaaattggttcttccgtagtcatacaatccttcatgcagcccgtctcctgttccgggctgcatgaagacaccttcccgacctcttcctttccgccgcattctcacccttccctcctctcatggaaacacaaccgcattcacgcctgggtcccttccttgccctgactttcatttattttctcgtcgggttcctgtccaccgtgaacggccagttccaggggcctttgcaaagcgccttcctgccggatgccggcgccttgaaaaacacgttcatcacgctaattccctttttctttttcctggcgtacctggtgaacggaaatatcgcctcccgctggatcaaccgctacggctacaagaccacgctgatacgggggctcctgttcatggtgcttgggctggccgtctttttcctgtccgcatggttcaccgtccagttcggggacctgcgcacgacgatcgccggggccagcatcccctacggctattttatttttctggcggggtcctatgccatgggcacctccgccacggttttgcaggtcgtcatcaacccctacgtgacgtcctatgaattgaagggaacccagcccgtccagcgcctcaacatcgtctgcgccgtgaattccttcggaacgacgatcgcgccgtttttcgtgaccggcatcctgttcgctggactgcccatggagagcgtccacgtgcggcagctgatgcttcccctgcttatcctgggcgtcctgattgcgctggtcaccctgatgacgaagcgcctttacctgcccaacatccgggacaccacggccggagaaggagaaaaactggaacgcagcatctggtccttccggcatttgacattgggcgtgatcgccattttcttttatgtgggcgcggaggtgtccgtgggcatcaacgtgaacctgcacgccctggaactcagcaattcggatgaaccgctgctgtttctgggctccagcaacctggtggtgtggggggtggacctgggcattccggccctgctggcctccctgtactggggcggactgatggtggggcgcatcgtttccagctggctgaaccatatctccccccgtgtccagttgacggcggcaacctccgcggcggccatcctgacgctggtcgccatttacacccataacctgtgggtgctggtttccgtagggttgttccattccgtcatgtggggctgtattttcacgctcgccaccgtggggctgaaaaaatacaccgccaaggcttccggcattttcatgatgggcgtgttcggcggcgccgttttccccttcctccagggagcgctgacggacgcgctgggaagctggcgctggtcatggatgctcgtcttcctctgtgagctggtcatgcttgcctatgcccttgcgggttcccgcgtcaggaaagaagacctgctggaaggaacggactgatttcttttccgggggagaagccgggtccggcggaacagcccgtcccatgctccgggaagttgattttccctcagggaaaaccatcatgtcctccgcctcttcttcatggaatgatgcgctctcaaccatttcattaagaagaatcatgaaagaaataaaatcattcagtcagggacagttgattcgccagacagggaatatttatccttccggaatatgtctgggcctggtcacttattggctcattgcatgccatcgtcatgaagaaagtcaattctgggccgatattgaacacagcatcagtacgcctcgtaatcagtccatttcaaaggcatcccttatctatggagagggatacgcggcaaaagcctccgttttccatgaacaaaacgacatggcggatgtcattgtccgtagccgtgaaaaaatggctattgaagggggaatgcggatgctgcataacgaaatggtcccagtaaacttcttccaaaataattttatggattacgctatttccaagattttacaacaggacgtcacctacactattttagccattcgaggagccgaacctaatggacacgccatcggcattcaccacgaaaaggggaaggtgcacatttttgaccccaacttcttcgttctggaatgcgacagcgagaccgatctgccaggagaacttaaagaagcatttctaaccattgatcatcgctaccaaggcaggtttaacaatatctttcacctggatgctttttattaaggaaaaactaccactcattcctgggatgagtcctccgcagcaggaggcaaattattgacggtaatccttctcaacttccatgagaagttgagagggattttccttttccataatcggcaagtcttcatctcaaccctcatacctcaccggcgcgaaaccatgtcccggaactggcggcaaccaggtttatttcgcatttttcttcatgatttccctctcatcctgtaacatgcgcccatgcaagacagaagcagcggctttcaatggcctgcccagtggacccctgatatcctcgccaccctgatgtttgtggtgcaggacggaaagattctcctgatacgcaagaagagggggatcggcgcggggaaggtgaacggacccggcgggaagtttgagccgggggaaacggccctccagtgtgtgctgcgggaggtccgggaggaactctgcattgacgttgcggacgcccgggaaatgggcgtgctgaatttttccttcacgtgcggcaccattccggaaatccgctgccacgtgttcatggcgtcctctttcaagggcacccctttggaaacgccggaggcagagcctttctggtgcccggtggacgggattccctacgatctcatgtggcaggatgaccggttctggcttcccgccatgctggacgggaaacggtttgaggcgtttttcacgtttgagggggaccggatgctggagttttccctgaaaaccggggattgccccggcaaggaaaaacaggcgccctccgcctccccttccctctgagccatccgggagaaaccggactttttttccttccggctctcccccggcagcatcaatgttcagaaggagacggagacgcccagcgccgcctgatgctccaggaaggattccctgaaatgcgcctggtaggaggcgaagacggagcatctgtcattgaagaccattctggacagcagcttgactttgaatgactgctttccgggagagtagcccttccccttgtaccgggattcccggtattcatccccttcccaccagccgtcccggaacgtgtaatggggatcgttccggtagatgtccgggcagtagctcccggacagggcattgatccatacggtgtttccggacaggcggagaacgtgttccagcgtcacccccatcgccagggacacattgtcaaacgtgccccggttgtcccgccgctggttatcatcatcgtcatcgtcccagtcgtcgtcgtcccaccagtaatccccccaccaggaggaatcgccgtaaccgccccggtcatcccttttcaccttgttggctccgtgcacatacgttactcccataaaggggatcacgctgaaggagttcgtcacctgatagcgccaggaggcggaaagccccgcctggaacgtttccgagttccacttggaggcgtttccccacgcatcactgtggcggcatttgttttccgtactgccgaaggccgcattcgcggcaagaagcaggctggaccgcgggcccgtttcccggaagaaggcgccgtacaggttggccatccacgcagactgccggaagcggtctccctctaggggaccgtccggatagtccggcatttcctgaatgttctggtgcccgaacatctgcccgaacgccagacccagcagggaaccggatttttctccatacgtgccgtagtcataccccagcgcgtagccggcggctgagtagtcaaaggaaggctggttgttccggattccggcatcgccaaagctgcccagagcgcccgcccacaggttggacggtcccttctgctgaaaacgggagatatttatctgggcggaggaggcttccaccagcgtctgcacataagccgcggacgcccacatggaatccagcgtggtttccggaccgctttccgggaactggttccaggattcggcgcgcacggcaggcaggcatcctgccagggtcaggctccataaggaaatacgggatagtttcatgatcgggtatgatgggtttaatggtcggatgttggaaccggccttcactttttcaagcgcacgctgatgcctgttttgtgtatcaaatgcatttcccatactccggagaactcctccctgcccgtccccgcctgccgttcatgcattccggaccggttagtatttttcctgtttttccctgttctttttcttcaggaaacgcacccctctgaccggctcccgtttttcccgtcaccgcgggataagcggaggggttccgcttctccgttccgtcctctcccggccttcaatttgtgttctttaagcttttcttcacggctcaataatgataaaggtgcgggagcaaccgtgtgatccttgatcgttcacttgctggctatttcaattcatattccattattcgacatgtatacccccgaattcaaaaacatcctcacttccaccctggacggactgcgtgcggaaggtctgtacaaggaagaacgcttcatcgcctcccagcaatattcccaggtgacgctaaaggacggacgctccgtcatcaacatgtgcgccaacaattacctgggcctggccaataatccggaagtgatggaggccgccaagaaagccattgacgaatggggcttcggcatggcttccgtgcggttcatctgcggcacgcagaccctgcaccgccagcttgaggaacgcctttcccagttcctcggcacggaagacacgattctgttcccctcctgctttgacgccaacggcggcctgtttgaaggcctcctgaccgcggacgacgccattatttccgattccctgaaccacgcctccatcattgacggcgtgcgcctctgcaaggccaagcgcttccgctacgccaacaacgacatggcggacctggaagccaagctccaggaagcggatgccgccggagcccgcgtgaagctgatttccacggacggcgtgttttccatggacggcatcatcgcccagctggacaagattcacgagctggccgccaggtacaacgccatcgtccattttgacgactgccacgccacgggtttcctgggcaagcggggccgcggcacgcacgaataccgcggcctgttcggcaacatagacatcactaccggcaccctgggcaaggccctggggggcgcctccggcggctatgtttccggcccgaaggaagtggtggacgtcctgcgccagaaggcgcgcccttacctgttctccaacagcgtggcccccgccatcgtggccgcctccatcaaggtgctggacctgctggaacagtccacggaagcgcgcgaccgcgtggaagcgaataccaagtatttccgcgacgccatgacggccgcgggcttcaccatcggcggcaaggaccaccccatttccccggtgatgctgggggacgccgtgctgtcccagaatttctccgcccagcttctggacgaaggcgtgtacgccgtcggcttcttctaccccgtcgttcccaaggggcaggcccgcatccgcacgcagatttccgccgcccacacccgcgaacagctggacaaggcgattgaagccttctgcaaggtgggcaagaacctgggagttatttcctgattcctgcaccctccatgacttcggacgcatcacccatgcccggcggcaatctgccgacgctgcccgtcaaacgggtggtgcgtcccactccttccattccggaccacgaagtcgtgcgccagataggcagcggcgcatacggggaggtctggctggccaggtccctgaccggggcgtggcgcgccgtgaaaatcgtctggcgtgaggattttgaggatgagcgcacgttcaaccgtgagtttgaaggcatcctgcagtatgaacccatcgcccgcaaccatccggggctggtccacatcctgcacgtggggaggcacgaccaggattccccgttttactattacgtcatggagctgggcgacgacgcccgcaccggggtccacatcacgccggacgagtatattccccgcacgctccagacggacaagaagttttccggcaacaagccgctgcccctggattactgcctggaggtaggcagccagctggcccacgccctgctgtacctgcacagcaagaacctgacgcaccgggacatcaagccggccaacgtcatcttcgtcaacggacggcccaagctggcggacatcggcctggtggcccatctggaccagcgcagctttgtaggcacggaggggttcatccccccggacggccccggcacccggcgggcggacgtttacgcgctggccaaggttttatatgaaatcagcacgggaaaggaccgcatggattttcccgcgcttccggatgatctgccggaaggcaccgtgcgcaagaagtggcaggcgttcaacaccatcatctgccaggcggcggaaccccgcgtggaggagtgcgccattgattccgcggaagagctggcggagaaaatagacgttctgcgggggtatgaagtgcctacccgcttccgcctccagaagaaaaagaagcgccgcaagctcaggcgcaccctccagctgctggccgccgccgtcgcgggagccctgaccgcctactggggggccctgtggctcaacaatagccagcatcccgcggaggaacctgccgcggacgtgcgcccggaaacccactcctccgcaccggaggaggagtcccggaccgggtacgtgctggtgaccagctccccggcgggagcgtccgtttatgatgcggacggcaattacctggatgaaacgccctacggccccattgaactgccctccggttcctccgtggcctataccatcaagaaatcgggcttcgcggacaaggaggaggcgggaaccgtcaagggcggctccacgctggccctgggcggcgtgctgaaggaataccatccccccacggacagccagccgtggaaggatacggagggagtcacctacattcccgcggaaacgcgccatgtggcgcaaggccctctcaccgccgccctgttcaacaagttcctgaaggaggaccaccagaagggaaactaccagatgaagagggagcaggcggaaccgggccatccggaaaaggacgtggccctgctcacgcaggacggcatcacggcctacctggcgtggctgaacaagaaatgcgaacgggagggactgctgggcaaggagttttccatcaatgcggacccgctgccgcagacgtccggcagcgcggacggccacagcgcctacgtcctgaacgtcacgcgcgtgttccaggtccccatcaccgtcaccaccaatccgccgggcgccagcgtctttttcaacaacaggctgatcggccgcacgcccattgaggaatacgtcaaccaggtgccctacgtgattgaaatcaaactgccggggcacgccaccatgcggcgccgggggctggacccgcaggatttatacctttccctccagctggagccggacaagtccgtcgtcttcggctcgccctggaccaacagcctgggcatggacctggcgcccgtgggaggaaacgcgctggtcatgtcccatgaggtgcgcgtgaaggacttccagcagttcctgaaagccacgggcaggaaggctccggctcggcccggcttcccccagggggaaaaccacccggtggtaaacgtcagcaggcaggacgcgcgcgcctttgccaaatggctcaccaacaaggagcgggcccagggcctgatcgaccagcacgactcctaccgcctgcccaaagacgaggaatggagctcctgggtgcgcctgacggatgaaaagggatcctccccctatgaaaagacgctgccccatgaaaactcccgggaggtgttcccgtgggggttctcctggccgccgccggacagaacaggcaattttgcggaccagtccgccctgatttaccttccttcctcccgcgtcatcgtggggtatgaggacgggcagccgtacacggcccccgtgaagaccttcccgcccaaccatctaggcctgtacgacctggaggggaacgtcatggaatgggtggacgattcctacggagggccggagtccctccccatccgcaattacggagtggcccgcggaggcagctacctctccttccgccccaagcagctcaccacctccatccgcacccccctgccggaaaacacgcgggatgacgcgctgggcttccgcctcatcctgtcttccgaccgccccgccgttcccacggcaccctgacgccggggcacaccgcccccgcagcagcagatttcccctgctcctccgttccacgcaacaagccgttccctaaagggaaaggtccgctgcagcccgcaggccgccccgcctctccgggaaaatggttgaaagggcctcccgttatgctaccttttccccgcacccttttcccgaatgaaaatcatcgccatcgccaaccagaaggggggagtgggaaaaaccaccacggccatcaacctggccgccgccctggcccagctgaagaagaaaatccttgtcattgacctggatccgcaggccaatgccaccagcggcatgggcattgacggaaaagacatgcccagcctgtacccggccctgctcggccagcttgcggcggaagagtgcatcctgccttccggcagaaaacggctggacatcattccctccaccatggacctggccggcgtggaaatagaactggcccgctccggcaaccacctgacccggctccgggaaacgctcgctcccctgcgggagtcggatgcctatgattactgcatcatggatacgcctccttccctgggagtcctgatgacctccgccctggccgcctgcgacgaagtgctgactcccctgcaatgcgaatggttcgggctggaaggattggccaaaatcctgcacgtgacggcgcagatctgcgccagcggagccaatccccgcatcaggcatgaaggggtgctgatgaccatgtacgacggccgcaccaacctttcccgccaggtcattgaccaggtggaacagcacctgccccagatgctgtacaagacggtcattccccgctccatccggctcggggaagcgcccagcttcggccacaccatctttgaacacgatccttccggaacggcggcggaagcctacctgaaagccgcacgggaattcatcagacgccacaaatcctgaaaacgcgaaggaacggctttcacgggaacggacttcatgaacatggcgtacaggaaggacaaggcagaaagaatcccccgccttcatctctccctttaggtttattccttccattctacttgcgccgttttagatactacgcacaggcggcagtcctgatacggaggaaaacaggcattcaccttgacttgccgcacccggcatatgagaatgcctccagcttccgcttcaggaactttccctcatgccagcagaagaaggccagccagacgaccagccccggacgacagggcaagtcccgcctcccgctccaacgacaggcctggaacagattctgcccggacgcccccctctcccccacgcggaagaaaaaggcgcctttttcgtttaccagagggagctggcccccggcacgcgcctggaacagtatgaaatcatccgcgtcctgggcagcgggggcttcggcatcacctacctggcgaaggacctgttcctgaaccgcaacgtggtcatcaaggaaaacttcccctccagctgctcctaccgggacccgctgaccgggcatatccggcccaacaacgagcacgacctggaaaactacacctgggccctgaagagtttcctgagcgaggcccagacgctggcggagctcaaccatcccggcatcgtcagaatcctgtccgtttttgaagccaacggcaccgcctacttcgccatggagaacatcaccgggctttccctggactacctgggggagaaactccacagcaccgggcaccgctacacggaggacgaactcaagggcctgctgacccgcctgctgcggattctggactacctccattccaggcacatctaccaccgtgacatcaagcccggcaacatcctgctgacggaggaaggcacgcccgtgctgatcgacttcggcgcggcgcgccatgccctgaagctgcatgccgccaccgtcctgaccacccaggggtattcctccccggaacaggcgctggggaaaacgaacatcggcccctggagcgacctttattccgtaggcgccaccttttacgccctcctcacgggccacccgccggaacgggcggaagtgcgcctgacggaagacggcatgccgccgctgcacagcgaccccgtgctcacccgctattactcgcggcagttcctgctttcgctggacaaggcgctggctccccagaccagctgccgctaccagacggcccgtgaatggattcacgacatttgcgccatttccggggaagaatcctccgccaccatccaggtatccccggcggacatccgccacattcatccggaaggaatgccgcatccctgcgcggagaagaattccgggaacaaaaaggccaccgccgggacgggcggacttcattcctcctcccgcaggctgtccgcgcgcaccctccgccgcaaccgccacatgatgttcctgatggtggggagcgtctgcaccctgctgctgggcgcagcggcgttctacctgatggactacctgaaaaaggcccccatgggcaccaccatcaataccatcaaggaggccatccagcagccggccgccaacgggaaggaattggcccctccgccccgggacctggcatccatccgcatcccggagctcagaatgacggaagacgcggcgctggaaccgcggacgctgaaggaattccagctgcgcctggacgatacgattctgacccgttccggcatcccctccatcctgccggaaaagctacgcatctcctgcatctacctccagattatccctccggccaccggaggggaggaactgcacctcaccatccgggactccaacggagccctggtggaccgttccgtcaactccgtcccctccttcacggtgccggggcaatccacctccaccttcttcttcccggccctgccggagctctccacggaccgcgcctacacatacgcctttgaaaccgccgcccacaaggccgtccccatgcaaatggcgtgcttcaaaagcgagacggaacgcacggaggaggccttccctaaaatccgcttcatcatcgcccccgcggcgccggaaccggccctgatgcatgaccctgcctacaaggggctcgtggcggcagtcaccacgccttccccggggcacgggaacgttctcggcctggcgaacgccacgccggacatgctggcggctctggaacaactgtccaaagccggctacccggtggcccagcaggtattggggaaactcctcatgtctcctgactgccccggcggccccaggccggaagaaggggtggaatggctctaccgttccgccaccggaggatgctatgaggccatgaaggagctgggcatcctgctcatggacatcccctcctattttccccgcctgccacagcagccccctctggcctcccgggattacgcccaggcggcgcggttcctgagaatggcggtccagtaccgggaccaggaagccctgtacctgctctccctcatgtactcccagggctggggcgtgcccgcctccccggagctttccggcctgatgatggaacgtctcaacggatccgcctacctgacggacagcctgaacccggaggcgcccattgcggcgtactggctccccctgccgcttgccaggggggaatccaccatcctgcgcttcaccgttccgggaccgttcgccccatcccagctcaagggcgtcacgctgcataacacgggcatgaaggatgccttctccatcagcaaaatcaacattctccagcacggacgcctcattctggacatcatctccccccaggaagtgctgcccggcaaaagctctgcccccatcggcatctccatcccggaaggcctgctggcggatacgtccctgcccctggaggtggaaatcctgctgacgcccggaaacagcagcggcgtggtggaaatgccgcctccggcggaaaagaaacgttccagaaacggaaccgattaagattcagcatcttttcataagaagcagaagccggggacccgtaaaacagccttgattcccgtcacgggaatgctacaaaaggaacatgacttcccttactttcctgcgccgcacgctcccctttctggccgccttcctgatggcctcctgcggtgaccccaccgtctcctactggaaaaaggcggcggacatcaatacggaatactcggaaaaaagcgatgcgctggtgcagcgcctcctgaagctgaaaaagaatcccacccttcccggcctggcggaaagcagcagggacgcggcggacctgctgcgggagcgggacgaagaactggcggacctgagcacgaaagacgtggaccccgccgtggcggcctatgtggaagaagaccgcaagctctttgccagagggcgggaactggcggaacgctaccagcaatactttgaaaaatacctcaagggaggtccggaattcacgccggacccgtcccgggccgtttcccacataggccgcgggcggcaggaaatacgcaaaatcctggctgaagcccggaaactggaagaacgggcggaagccctgaggaaagaaaaatcagccgcgtttgaggaggagcttcctccgctgcacttccgtcttccggaaatgaagcagctgctgtccaaccgttaaaaaccgccataaaccatctttccggctccggctttgcacgggaggcgcctccgtatccctcccccttttcgttcatcagccatccatgaagcttcttccggcccttttcctcctgctcattccctccctttcaaggggggagcggcatgaaacattctgcagaaaggccatcaagcttcaactaaccagcttctttccgaaataccgttatttcctattcaccggcagttacacttccccccgcgccgtactctctgcagctgccagtccaacaggactgagcatcagaagcggaaatggaatttctttgaaagacacgtccatcagcatttcccatcattcctatgaacaggaaacaggcaaaggcatattctccctgggccttctggttaaggaccgccccttcccccaagacggaagaatccagatcaagggaaaggtgccggtgaaatgcgcgcggctggccactctgccagaaacggaaatcgatctccgtccgaacgccgcgtattccatccctctctgcatctcctcctttcttgaggaagggacggacgtagccaatctggaaaaatgcccgcatctggacataagggtgaatccgtatacggaaaccaacacatggagcatcgggctcatttatcctgtgagcttcccctatgccggcatggtattccttgaccgggagggacacaggatccccgtgaaaacagaaatggcgcgatgccgttcggggccgatcgaattccacccgttcacctgcactttcccggaaaaatatgatcgcgtccgccttgtcattcactatgcggaaaagcaggaaaccaggaacttgcccatcaacgccgccgtctcccgggaagacgccttgaaagcaatgccgccccatccggaaggtggccggattcccggacagccttccgcagaaacagcgcatcttttccaaaaacgagattgacacccgcggttctttcccctagtatccgcgcacaacatcagcggcggggtagccaagtggtaaggcgacggtctgcaaaatcgttattcgcgggttcgattcccgctcccgcctccatgtttactttcaaacgtttacgcctttagcgtagcaagaaacgtagtaaacctcttgtttttagctccacattcggagcaagtcttgtcccgggagggggggtacggtatgagttccagcccctctgttatccacgctcaaggagacgcgcttgactacctgttgcatgcgcacggagaaacacaggagcaatggagcgcgccttttgacgccacgcccatcctcccggaactctcaaaagcactctatgaatgcggtctaaaccaccatcaacttgacgtggtaaaagaagaaatagcggatgcccgtttgcatatccttatcggtattttcactatcctttttcgcaacggccatcacccgcaacgcgttacccggaacgtttacaagcttgccaaactctactgtccaaaatccgtagaaaacttgtcgcattctgaccttgctctcctgaccagtgataccatttccgcatcatccatgcgggcgcacgcctgcaacgatttccttgactccttaacacccgatcaagcgcaagctcttatcgggaaatacgggaagactgccctgcgcaagcttgcacaagtatcttggaccagccggaaggctcaaaagaaatcccgcaaaaaaaagaagcaggacgcccccaaaccgcgcacccgcaaacacccggaactcaaccttgatctgtaacggaaaaggacgaagatggacacgaaagcaagataccccgctataagctcacccaagcttccaataaacgcttttccttcctgctcaattccacttatggcggcaagacgttccagttaaatgacggccgcaccgtcaaatgggactcccgcggaaaaaagcgaagtaagaaatacactttccaaattacttgataaaagctgataaaagctgataatatttatcttgacaaaaagtggttctagcacatattggcattactactagttcgtgtatcgcatacacctctaaaaaatcgccccagcctgcgtcaccaggccggggctttcttttagctagtcagaacaataataagttccatcagccgtactactaattcggggttaagtatcacatgttacacctcctttctttagtccgggaccaacccggcaatgcggatatacaggaatatcccctttattacaatttatttacaaccgcgcaaactgaaagtgcatccagtcataatcccgctcccgccccagggacacgccgccttcatcttccacgaactcccaaaaggcatcataatccgttccagaaaggcgtgcctgcggccgatgaacttttaggccgttatggtcagggtccattctaccgcaatcccccaagaatgcattgacggccggctaatggtcattcggtagcttccgccattgcgccaggccgccgccccttggcttctcaagctgctgcccggacacaggaagtgctgcactccttggcaaaagtgacagttagagttagagtttagacaacaaaaaagccgtaccctgtgaggacacgactagagagaggaaggcaatgtgacttatcaggcgtatctatttgtaaaagaaaaagaaatgagcgtaagaattgctaaaattccaatgattgcgtatcctgtgaattgagcgtttctcagtctttgctgatgcttatcttgaatatccattttttgcttgttgatgtcacggcggacgtcgctaagcctggtttctaaagaattttttgcgtccagtaggtcgttaattgtgttctgaagctttttaacggagagtttgtgttcctcgtggagttttagaaggtcctggtgtgctttttctcctacgggcacttttgccacgaattcttcagagtgttcaaggtgtgcaactggtttattatgcggagagttcaattgcataaatttttcttccgcccggtccatttggaccaattctttttccatagtatctatggattccatgagttttctgttttgcagggcaaccgctttgttcatgttcctgtgctttttttccatggcttccttggcttcaatgatcgcataagaggttccacggcctccagcccttccgcttgccattgatgcgcgggcggcggacctcatagcgtcttcccgtcttgctatgtcttccgtatcacgtttaatgatgtcagcaagtttcctattattaagagttatctgttgtttatttttatcaagtaatttagctattctgcccgtcgtgttttaaaagtcgccagcgtgacttcccattccttagcagttaattcacggttagctagtgctgtttccacagcggcctttttacggcgtaaagcccgttccgcgttctgttgtgctgttcgttcctgttgtgcttgtgtttgtttgaggatagtttctaacgcatccctcttgttccggaatgtttcttcttccaggtcaagagtgtcataagattcctttatctttctctccagattattgattttgggctctgtagtgagttgcagcttttccagttgagagttcagttcatttacgttctggtcgtgttgtactgtcaaatggttattgtaccatactgttccaatgatggctaggatagtaaggatggatagcagatagcgcatagtttttgtagcagataccgccgttatatattggcattatttggcatgcaagttttttgtattggcttggtattggtgaatcaggttgttttcacactttcaagaatgagggagggaactcccgtaagtacgcttttttgcggccttggttaaatagttcttgccttttgcgcggtggttgtgtttactccgtcgcgcagtccctgcaaacctaatgtcgcgttcgtctagcggtctaggactcccgcctttcacgcgggcaacacgggttcgagtcccgtacgcgatgccagttttttcttttccttccgtcttgaaccggaatcttttttacgccatccccccggtatgtttctggatttttccacccgttgtggtatggttacttccgccatggcagcccagaacgaaattatgctgaacggagccccgtatggactggcggaaccctgttccgtttcccggcttctggaactcttgaacatgaacggcaaacccgtcgtcgtggagcacaacggctccgcgctcctgccgcaggattttttccgggttacggtttctcccggagaccgggtggaaatcgtctccatcgtcgccggcggctaggctccctttttcctttatttcccttcccaatccgtcaccgccatgccctccatccacgtcatgtcccccactcttgccagccaggtggcggcgggcgaggtggtggaacgccccgcctccgtcgtgaaggagctggtggaaaacagcctggacgccggagccagatccgtgcgggtggagatacgccgcggaggcgtgggcctgatcaaggtgacggacgacggctgcggcatgtcccgggaagacgcgtgcctgtgcgccaagcggcacgccaccagcaagctttcctccctggaggacctgtttgaaatcactcacctgggcttccgcggggaggccattcccagcattgccagcgtctcccgcttcaagctctgcaccaggcagcagcaggcactggagggctgggaagtacgcatcgacggcgggctggagcacgagccgagaagttccggcgtctcccccggcaccgccattgaggtctccgacctgttttacaataccccggcacgccgcaagttcctgaaatccgcggagacggaggcttcccatgtggagcaccagatacgcctgcatgccctggcctatccccaggtgcgctttacctacaagcgggacgaccagctcgtcttcgaccttccggccacggcggacctgcgcgtccgcatctccgcgctgacggatgcggctacggcggcagccctgattccgatagaaacgaccatcgggcccggcatttccgtcacgggcttcctgctcccgctttccgaggccaggcgcaccagaaaggggcagtacgtcttcatgaacacccgccccgtggaggaccagctcatcaaccgggccatccgggacggttacggcggttttcccaccgggctgcatccggcgctcttcctgtacatggaggtggagcccgcgctggtggacgtcaacgtgcaccccgccaagaaggaggtgaggttccgccgttccgcggacgtggttaataccattgtggaggcgattgccaacaccctccaaaaacacgcccggcaggaaattcacgcttccgccgccgtgccggagacggacggcggccctccggaaccgccttccgccgcgccgcatggggaaacaccctcccgggcggacaattcccaggccttccctccggcaaaaccccgcacggcccccgctccttcctccaaactcccttccctttcttcccccgcccccagcaggcaatcacgggaggctgttcctcttccccccctgcgccccattcccctgaagcaggttcccgccacccaggggaaactggatttccagcatcaggcggagggcggcggcgcaagggacgcctgcggaaaggccgctccggagagggacgccaccgccgggttcacctatatgggaaccctccaccagcaattcgccctgtttgaaacgccggagggcctggtgctgatgcatcccagggccgcgcgggaacgcatcatctttgaacggctgcgggcgcaccgggaagcgcccatgccgtcccagcagcttctggacccggtgatactggacctggacccgcgggattttgccgttatccagcagttcgcaccccactttgaccaggccggaatgaccgtcacgcccttcggccagaacacgatcaggatagaatccctgcccgccctgctggaactggagaacgcccgcgccttcctgctggagctggtggaccgcctcacccagtccgaattcagccggaacgccaaacgcatggcttatgagaccttcatcggggaaatcgccaggaaatccgcctggaaggaacgtatttccccgcaccgcgccccggccatcctgaaagaactgctggcctgcgaagtgccgtactgcaccccgggcggcaagcccacgctggtgaattattccattccggagatcaaacgcaaattcggcatccaggcgtaacgggccgggaaagcggaaggccggatacctggtctttcagctccacatttgaaatggaaggccgcgcagaagagcagcaggcctttgccgcggccgaaaggaaaccgggagccagcgaaggaatgttcaagagaatgaaggaatacggtttttgaaagtgcggcctttgtccgtgcattcattcagaagcatgcggcgcttcctgaaagccttctttcaaaacaggaggtaaatgccatccttccatgaaagccgtttttcactccattccttttatctccctttcctcccccttttccggcccatccggttttaacgcgcgggccgccgcatccatcccgtcctgtacggaagcttgctcttggcaagggggggtcccgcgtttataatgttaccttccctgtcgtcatccagcccgttcccagccatgccagaccccgcccccagcaagccttccgcaccacgcattgctgaaaccgccgccggaaaagccctgatggccctgctggcccttttttacgcccttctggcgacggcggcggcaggtggggagtggcacaccctttttcttcccgcctgccttctggcggcggcccttctgctgttctgcttctgcatcctccgggggtacaagattcccagccccgggctgccgggatggctggcgctggggctgggaggcggctatttcctcctgcgggcgtggttttcaccctggttttactatgagggagtggcggacctgggcctcatcgtcacggccatggccatgttcatggcgggggcgtatgccggagccgggaatggggaaaggagcgttcttcccgtgctggcggcggcgctgggattgctgaacgccctgctgtgggggtaccagaacatgacgggtacggaggcctcctggttcaggccggattattccctgttcggaacggagctgcgcaacatcgggctcttcgggtacaagaatttttccgctcatttcctgtccgtcacgggatttttcctctgcgcgtacagcatggcttccgccaggaaatggggcatcagcctgttcacggggctggcgctcgttctcgtttccttcacctgcagttcccgcgccgcctttccgaatgcgctggctggcgtcaccctgtgctttttcatttatacctccagcgttttccgcaataacaggaaattttatacggcggccatcctgttcattctgcttctcttcctgggagcggcttatgccgtgctggacctggccaacggagccggaaagctggcctccctgctggatacgttttccttcgggagccgtctggacctgtccagactggcgtgggcgctggcggaccaggccccatggttcggccacggcagccggatgttcaccaacctttccacggaattttttgccggggccagcctccccaatttcgcccaccatgagtacgcgcaggccgcctgcgactacggctatgccgggctggggctgatgctggccctgctggccctgttcctcgtttccggcttccggagcgtgctccagctggcgggggagcgccagcgcgccaatcccctggggccggcggccttctgcgtgctgtgcatcgccgccttccatgcctatggggagttcatctggcacaatccggcattgctgggcgccagcgccctgtgctgcggcattacctgcaccgcctccctttcccgggtgaaggcctcccggcgcgccggacgctggttccaggcctctgccgcgctgctgctggcggcgctggccctgtgctacgcgttccgggctttcccggtctggaaggcctccctccggcccgttccggtttcctccaacgaacggcttcccatgctggaagaggccgcttccagcagcctggacccggacctggtgcggcgcagcatcctgcatgccgtgggcagtcctgccgctccagacgaggcgcggctcagggaactggaacggcaggaggaagaggcggaattgcggagtcccggcaatcacggcctggcagcggccaaaagcctgctttacatccgccaggggcgccttgcggaggcggagaggctgctgcgcccctatgtggagagtcccggcaggtttgacgaccgcatgttcgcctggaccaccatttacagtaatatgctgtattcctggagcgcggccattgcggcccagtctccggggcaggccctgtccatggcgctgacggcccagcgcctgatgtccgcccagacggatcaatggctgtttcacggctctctgaatccccaggtcaggaaggaacacgacctgcgcctcagcgagctcaagatgctgatcctgacactgcaataccgcggagccgtacccgatgcctcctggcggaagtaggggcgtcctgatattttcaggccaaccccgttcctgcgttttctaaaatgaagttctgataaaagaaaatatgaaatacttgaatcaagaaatagaaagcgaattaagaaaccggggagcggaactgatacgttttgtcagcatattccatttagacgaaaagcaaaacaggcaactcccgaacgccattgtctttgtactcccgctgaccgcagagtatgtcaggacggtatttgatactcccgattacgtacaagcgcggatagataacaattacgatttcgatgatgatgaattttcacaaactgaacataaggcgggggaaatagcagacgatttagccaggttcattgccggaaagggttataaagccatatcgcaatccgatacggggctggtggctgatgacgtattcaatgatgaaaccaaagagtcagtattacctcataaaacagtcgcgctacttggcggattagggtggattggaaaaaacaacctgttaattactcccgaatatggcgcagcacaatgtctcggtacggttttaactgatgctccactggaaacggtattacatgaacctccatttccaaagtgcggaaggtgcagcgcttgtgtcaatatctgcgagagaaaagttcttaaaggtaaaatttggagcatctctgtttcaagagatgagatcgttaacatatatggatgcagcacctgcctgaaatgccttgtgcattgttccagaacacaaatatataaaaagaggaatattaaataaagagtttcaggatttatgccggtgaactattcctgaaatgaaacaggcgactggataatcatgtgaatcaagcaattatcccgcgcggagcgccagtttatttcccttgaattccccggacagtttctgacgaagaagggaaacccgcgtccttcattcatttagcccatgctttggagcaggccttcaatgttacttccggtccagcagcttatctccccagggtaattttataaaatttctgtattcatcggattttcaatccgttgtcaacaataattcatttaaggcaagattttttaagccttatccggtacgcttattcactttttccggacacgaggaggaataggatgaaagagaaataaacccttggtttcaagttcataacgctgtctctgcggattgaaaatcccccaggcttcgggaagttttgcggacacagccgcaaaacccaatccaagaacaaattccaaattaatgactccgagacttcctctccccctcctcgccgccctgctcctgtcacaggccgtgccccatgcagccgcttccagccccatttcctgggatgacctcgttcgggactggcaggacgagtccatcactgaaacggtacttgacctgagcggggacggttccgttgcagaggtaacaagcaacgggggcgccgtcaccgtctcccagggaacttccctggcgctgaatggaggccaccacaccatctcctccaccaagcagagcgcccaggttttcaccagcagggcgtttgacaaccgcggcacactggaaatcagcgactgcaccatcaccggcaatttcaataccgccgtgagctggttttcctcttcctccggcggctccatcgccaacggtgagaacgccaggctgattctttccggatgttccttttccaataacggaatggtttcccagacagacggagaaggaggcgcgcttgccggggcggcaggttccgtgatgagtatccaggggtgcgatttcaccaataattacgtctccttccatgaaccgtgtctgaacagcccccagcagtacggcggtgccattgccagctttggcgccgttaccctgagcaactgccgtttctccggtaattacacttcttacctgaatgccggggccaatggcatgagcacggcggcgggaggcgccgtctccatggccacgtacggggcgcgcctggaaggggatgccctggaattccacgggaattacgccatgggttatgcagcctccggtggagccgtgaacttgaataacaatgcctccatcaagctgagcaatgcctcttttacagggaattatgccttctgcacggctcattccaccagcgcaggccgtgcgtggggaggcgcgctcaacctggaatccgggtccacgggcacgcttgtttcctgcgtctttaacggcaaccatgtctcttccatgacggagacggcatcaggagggggggccatccacaattttatcggctgcacgctgacgctggtgaattgttccttttacgataattacgcttcttccgcagatgcgtccctggcgcagggaggagccattgcgaatgaagggcggctccggattatcgccaacgggcgggacagcattttccgaggcaacagggaccacgttccggcactggggggcggcggcgcttccaatgccatccactccctgttttccaccggcatcgccctttacgccgggaacggcggctccctggtcttttacgacggcatccggggggagaacgacaggaacatattgacgatcaacaagcccggtgcggaaggctatcccgtggacggaaccgtctttttcaaggacggagcttccattgacggattcaacacggaattgtaccagggaagcctgtgcatgggggagggaacggccatccgcggctcgctggatgcatggcagggaagcagtttcatcattgaaggctttacgacgatggacggccagtacagcgtgcatgccgtgaagccgggtgccgtccataccgtgctcgtcagaatgaccgattccatggcggcggccacggaagagaatcccgtatggaattttacggaaggttcctccattgccgcctttgcgggttccctggagttcgttctggacgtcagccgcctcagcattccctatgatgaattgcaccccttcattttttcccatgaggggcagacgcaggagctgatggacagcgtcaacggagccaaaagcgtgcggctggtggatgccgacgggtggagctacagcgtggacggttcctttttcgattacctttccggacagaatagaggccttgttccttccggaccggacacggggggctggcggcccccgtccggcgtgggaggcgtgcagggcaattcccagtggaccgccgtgcgcagcctccgcagttttgcagaggccgccagaaccagggagggagaacggctgaagccggacgggcgcgcggctttctggatcacggccacgggggattatttcacccaggcctcccaggccgcggtggaaggctaccgcttccgctcccacgggtattccgtgggcgggagttacgatctttccccggtctggacggcggggggcgccttcggccagagcttcgggacgaacgatgtgaacaatgacctgggcagctttgaccaggacgccgtcatggcccttttccaactggcgcggtccgtgcaggtgaacgcggaagattccctgcttctgggcgtgcaggggggctatggcaccgcccgcagcaaggggggcgttatttccccggacctggccggagaccgcctggaaagctcatggaaggacagaacctggctgctcgacgtacagggagcatggacaaggaggctgaaccggaaaacgcggctgggcctttattccggcctccagtacgcggggagcgttcaaagcgcctccaccgccgcaggggaacgccatgcctaccatctggaagacagctccgcgaatgtcctgcgcggtcgcctgggggtggagttccaccggaacggctccctgctgggacgggaagcggcaggctacgtccgcacgggaatcgcgcacgatctggaccggaaaacgccgcatgtttccgtacgtggaacctcccgctcctggacggccatggccgtcaaccctggccgtaccgtcctggaggcttccgccggattccatgtcagcctgtccggcaactggagcgcgggcgtggattacagtctggaagccggcaaccggcagctgaaccagagcggaagagcaggcgttatgatgggattttaagtgtcttcagccacatgttctccggcaccgtcccctctccggaacggtgccgtttttttgccgttttccccatcaccaagccgtttccattcacggcatcgggcggcgcatgtcccgacgcagctcaacaaaagcaagccttgcccgctctattccttcatcagacttttttcgtatgaatataaccatcaaacgaatttatgacccgaaggaaaccggagacggctaccgcgtgctggtggaccgtctctggccccgcgggatttccaaggaaaaggcttcctgggatgaatggctgaaaaatgtggctccgtccacggcgctccgccagtggtttgcgcatgatccggccaaatgggacgccttccgccggaagtatgacgaggaactggacgggaacaaggaggccgtttcccatctgctccagctcgcgcggaagggaaagcttacgctgctgtattccgccagggagagggaccacaatgaagccgcggccctgagggattatcttatgcagcggtcttcttcataagcaggcgcgcatttttgaacaagcgccgtttacaggcccaaatgctgtcacagggacctatgatatggccggatttcttctctcgttcatgaacaggcgaagaaaatggaaaggaggtgaaacaacatggcaagtagttcccacatgggtggaaatcacaaaagcggttcttccaagaagcgctccgaaaccaccacgaacaaaaccgggcagcgcgtcaagcgcgatgcttcaaccgggcagtttatgagcgataaaggctcaagctccaaggaaaaacattaattccccgtgagctctctgcttaattcaggttccggacttggtccggaacctttttttatccctgtccgctccggaaaaagcggaagagcgcaccccgtcagcgcaggtccaattcttcaaacgcacgaaggccgagggccccgggctccttccggtccccgcggaccaccacggcaaaaggttcttccctgcccggcgcgtagtacgccgcacgcaggaccagttcatccccttccaaacgggcgtaaacgcccacgggcgtggaacagctcgctcccaggcgcaccaggaaggcgcgttccgccagagcgcaggcgaaggcttccggatcgctgattccagccagcatttccatcgtctcccggtcggaagagcggcattccatgcccacgatgccctgccccacggcgggaatgaaggcttccaccggcagggggcgcatgtagagcttcctcccctccacgagggtttccggcgcatacagccccaggcgttccagtccggccctggccagaattacggcgtcccagccgggatgctccgccagcttcgccaggcgcgtgggcacgttgccccgcaggtcttcaaaccggaggccggaaccccagtacgtgcgcgccatcaggcggcggcgcacgcttccggtagccagcgtgccggagccgttccagtccggctccctcgtaataagcacgtcttctacggcggcgcggggcagcacggcggccagcgtgaaaccgggggccagctcgctgggcacgtccttgaggctgtgcaccgccacgtcaatgcggccttccaggagggcggtttccagttccttgatgaagattcccttgtccacgatgccggaaacgcgggccacgtccgccagcggcacgtccgtgcggcggtccccggtggtatggatgatttcccggcgcacgtccagttccggataacggagggagagggcggcccggaccatgtccgcctgggccagcgccagggcgctcccgcgggtgccgatgataagggtgtttttactggtcataaagcgcggagtccggaaagtatttggagatgttgtcctggatgatggcttcgcaccgggagacttcctgctcccggctgcgcttggcttcatccgccagctgggtgagggtgtcgatatcgtagaggtacacctcgtcaatatccgccacgtccggagagatgttgcgcggcacggagatgtcaatcaggaagagggagcggtacttgcggggcgcgcgcagcggcagcagcgtctcccgggtgatgatgcagtggggggcggcggtggcggccaccaccacgtcaatgtccctgaggtagtccccccacacgtcgtaccggatggcctggccgccgatcatgcccgccagttccaccgcccggtcaaaggaacggttggctacatagatgccctccgccccgcgggcgtgcagggcgcggcccgtgacgcggctcatctccccggctcccaggatgaggacgcgggtgccggaaaggtcgccgaagatttgttccgccagctccacggccacggaccccacggaggtggctccggcgtgaatctggctgtccgtccgcaccctcttgccgatggtgaaggctttctggaaggtcttgttggcgcaggccgcggtcactccggcgtccagcgccatctggtaggccgtcttcacctgcccgaagatttccgtttcccccagcaccatggagtccagcccgctcaggacgcggcacaggtgctccagggcatccgcccccagatggctgtaaaagtgggaggccatgtccacgttcccgcggcccgctcccaggaagtgggacaggatgtgttcctgcgcgctttccggcctgtcagaccagtagtagatttccatgcggttgcaggtggaaagcactacgcactggtccacgtccggcagggagcggatgcgccgcccctcctcctggagcctgtgggacggcacggcaaagcgctcccgtatttccacgggagcggtccggtgattcaagcctaaacaaaccattctcatcagcttaccaggaaaatgctcatggatgcaataaagagggccacacagcagtaggccagggcgcgccccggcatgccgcggcggtagatgaaccacagcagaatgctgtagcccagcgtcagcagaatgacgatggaggttttggccccgttgatggggagatgcctctgccagccgagccattccccggccagaagcaggaggaacgccaccagaaccagacgcttcatgctggcttccagcgtgcggatagggggcagaagacggcaggtgccgggtatctgccgccttttgaggcattcgttctgcatgcagaacgccacgcccgcagcggcggccaggcctccggctccgtaggacatcatggctacgcccacgtgcgccgtcacccagaagtcatgcgtgccctgcacatccgcgccgtacaggccgatcagcagggaaagcgccgtcagcacggcaatggccggagcggtgaagatgcccagcacggacatgcggtaggcgcgccccagaagaaggtaaaagaggttgatggtccaggagaggaagaagagcacctccgacgcgccgcggatggggcacatccccgtctggtacgccttgacgcaaagcgcccccgtctggagcgcaaagaggcacgccatccagaggtgggcgtataaaaaccggcggccggaggccagcaggcgccagccaagccccgtaaaagccagggacaggacgagagatgcaatggcccaccagttgtcgttcataagtcctgtacggaaagcagctcaggaacgcaggtcccgttcaatgacggcatacgcctggtggttgtggatggattcaaagttttccgcctccacccggtaccagctgaaagcggagtggctctgcgttttcagcgccacgttgcgcaccaggtcttccacaaagacggggttttcataagccttttccgtcacccatttttcatcaggccttttcagcacgctgtacagggaacagctggcgcaggattccaccaggtcaatcaggtcttcaatccagacgggccgggaggcgaagcgcacggagtaggtgaccagcccgcgctggttgtgggccccataggcgctcatggccttggaacaggggcagagcgtcgtcaccgggacgaccaccgtcagcttgaagtccgccagcttgttatccgcttccgcctccatctcaaaccggaccacgtagtccatgagtccttcaattccggttacgggggcgtttttggcgcggaagaacggaaactccatttccacatgggagcggcgcgcggacaggcggcggagcagttcccggggaatggccagggccgtatgcacgtccagcagggggccgtgctggtgcagggcctccacaaagcggctcatgtgcgtgcccttgaattcctccggcaggtccaccgccagggaaaccgtcgccacggtggactggatgcggttgagcttgtcctggatctggatgggaaagcgcagccccttgacgcccacccggtcaatggagatattgcgcgtatccgtctcggactgggtatctttcagttcctgcatgcggaaggaggatgttggctggaaataaagcgggagtctgccctgttaccggacaaactcccgcctgcaaagacaatttctaccgaaagagatttccttggggcttgttacggcagaaggttgatggaacgggcccgcttgatttcacgggtcaccttgcggtgcatcttggcggacagcccggtcacgcggcggggaagaatcttgccggtttcagaggtgaacttggacaggaaatcggggttgagcagatcgacctgatccatcgggatgtcgagacggcggcgcggcatctggcgattgcacgtgcggaaacgaatacgacgttctacagtcttgggttcagtggacatagtaataaagataatcgatgagctggaccgcggttaacgcatttcacgatgaagcgtgcggcgcttcaggaaaggattgtacttaaccttttccaggcggccgggggtacgcaggctcttcttgttgcgcgtggtgacgtagcgggacgtaggctttccttcggctttagcctcggtgcattcgaggatgatgatgtctcttggcatgatgaaaatgtgttacgggggaggatttatacactattcttcgtcatcgtcaagagaaacagataaatctacatcattttgtcctcccgcaaagcccagggccactctggggcggaaccgggcgttctgccctttttccttttcccactgggcctggcattccaccgtgagccgcgcgaagggaatggcctccagccgcaggatgggaatgaccttgtatgacatttcacagatgccgtacgttccgttgtcaatgcgggcgagcgcctgttcaatctcatacaggccgtcctgttccttggaaagcaggctgagcgcaaagtcgcggtcataggcgtcgctcccggcatctgcctggtgttctccggagccggaggcttcactgccttccggatggttccggagggtgtcgcgggccacgccgctcatgttgtccagggccctgtcgcgcaggtccatcagatgctggcgctgcatctgcacaaagggttcccattccggattggcggccagttcagccttggcggcggcgatggcttccgtctgctcatccgtcaattcattctttgcggcagcgggagccggggcggcgggggaggaagcgatttttctggccggggccttccgggccgttttcggttccgtcttcttttccacagcagccgcgggggcagcggcctttttggcgggcttggcggctttttccggttcagcggcctttttcctgcagcactttttcctggccggagcctcctgctctacagcggtcttgcaggcggacttcccgcaggtctttttcttgggggccggagcttccttggcgacggtcttgctatcggttttcttgggagtaggcataggaggtgtctctatgggctgaggttgacgatgtttcacgaacagcgggcgaaaccgcccaactgactagactatgagacactacaagcgctcaaatgttcattcaagaaaattcagctatgaaacaagtcatttttcccgctgccccgcctgccttttttttaacggaagcatacttcttttaaccttttcaatgcccggcaaaattctatattggtaccatatgacagcttcaaccattccctccatcggcattgacttcgggggcacctccatcaagctgggggtcgtcaaaggcacggaagtgatcgcgcacgcgccttccatcgccacccaggaatacggcaatcccgaccaactgattgaagccatcgcccagttcgtgaacatgctgcggctgaaccatccggaagtgcaggccatcggcatggggatgcccggcttcgtcaatttttaccagggcaccgtttatacgctcaccaacgtgcccggctggaacaacgttccggtaagggacatgctccaggccgcctgcggactgcccgtgtacgtggagaacgacgccaactgcatggcctacgcggagtggaagctgggagccggaaaggggaaaaggcacctggtctgcctgaccctgggcaccggcgtgggcagcggactcatcgtgaacggggagctcctgcgcggggccacctgctccgccggggaactgggccagaccagcatcgactaccgggggcggctgggccattacggcaaccgcggttccctggaggattacgtgggcaaccgggaaatagcggcggacgcccgcaccctgtatgccagccacggcgttgacaaggccattgtggactgcaaccccatcgccctggaacgggccgcgctggcgggggatgaagtagccgcgcaggtctggcgcgacctggccgtaaagctctcctgcgcgctgatgaactgctgctacctcctgaacccggaggccatcatcatcggcggcggcgtggccaaggccaagaccctgctcttccagccccttcaggagatcatgaagacccagcttgccgctccgctggtggagcatcttgaaatcctccccgcccagttcggcacggaggcgggtatcctggggtccgcccatctggcgctcaacacccatttcggcgaaacgttccgggcctgatctcgtgtccacctcccaaatactgaggctcacccgcaagctggagctgacagcggaacaggagcaggattttctggacgccatgcaggcaggggaccgttccagaagcgcgctggtcatcaccccgaaagctccggaaggctacctgccgcccctgccggcggaggaaacgccgcgggactggggccacccttccatcctggcgctcccggcgggagaagcggaggccagacccggctccctgccggactacgaacgcggctattactatcccctggacctctcttccgtctgggagacggctccgctggcgcatctgccgttccggccggaacgctgcctggacatgtgcgcggctcccggcgggaaaagcattctggcccagacgcggatcgccccgcgggagcacgtctccaacgaggtgcacccgaagcgcctgggcattctgcgccacaacctgctgcgctgcggcttcaccggcgtatatacccagcgtctgcgcccggaccagtgggcggagctggccccgggctgctttgacctcattctggcggacgccccgtgcagcggtcaatccctgctggccaagggcattcccaaccccggctgcttcaacccctccgtcaccgggggcaacgccaagcggcagcggggcattctgctggcggccctccagtgcctggcgcccggaggctatctgctgtacaccacatgcacttacgccccggaggagaacgaacggaacgtcctgtacctgctgaaacgctgtccggacctgcggaccgcagccgtgccggagctggagcctttccgttccgccctgacgcaggaggcctgctaccgactcatgccttttcacggcgcgggcgcgggcggcttcacctgcctgctgcgccgggagggagagcatgcgccccagcctcccctgccggacgaattgaaggcctggcccatccatgccatgaaccgaccaacaccatgaagataggcgttttttccgacatgcacgaccgcacggaccacctggagcttgcgatgcgccagatgcgcctgctggactgcggacatttcatgttcctgggcgactgcaccaccccggagagcttccagcgcctgattgaactgacgtggggcctccctctggacgccgttccgggcaacaacgactacgagcttgccattatgcgccaactggccgtctgctccccggcggcgcgcctgcacccggaacacgtcctgctcaccaggtacggcatgaagttctccctctcccactatcccaaatacgccatgcaggaagcgcgcagcggcagtgtggacgccgccctgtacggccacacccaccaggccgtgcgggaaatgtaccgcgggtgcctgctggccaatccgggggaactccagggcaggaccggccgcatcggcttcggcattctggacacggattcccgcatcatgaacctgcattctctggatttcaacgcatgatgaacatcctggacgtctgctgcgccctgattgaactgccctccgcacaaggaacccttctcctgggagccaaaaagaaagcggggcagtccaacgggcttttttatgaattccccggcggaaaggtggaacccggagagaacgcccgggacgccatcatccgggaaatacgggaagaactgggatgcgccgtccatcccgtccgcatgctcacccccgtccggcaccgggaaagggaacgcatcatccgcctcatccccttcctgtgccgtctggagccctgcgccctgccccggcccctggaacacgaaagcctgggcttcttctccggccgcatgctggaaaaactgccctgggctcccgcagacctccccgttttaaggcagtggatggaagaaaaccgctgacaaaacggcagcccgttcagcttcaaccactccgcggaggattgcctgcgcatgtctgaaaagattccaaaaacaccttggatcattcccccttctggggtatataaggtggtggctgctgcactcgtcattacctggcaaagtggcccgaaccgatattacaacctaatgggggcagccccgacgcagggctgactatgtcctataccggaaaagtcaaaacagcggcggaagtccccgctctattgaggcacgggaacgtggctcacagccagagacggtgcagcggtgtctttctctttcccttgcagccgggaaccccgccggggcctgttttcccgatggccccctcttgaatccgcaccggaatcaaagcattccggcacggctgcttttattgcttttccccgcacctctgcgccccacggcatttcctggcaggaagcgcacacgcgcttaaaaggaacgcatgcgcgcgttcgccaccatggccttcaaatatttccgggccttccgctcccgcccctccttccggggcggccgggaggaacggcagaaggaatgaagcagcctgaacatcaggtcaaataaatcgttcttgtacatatggttgattggttgtttccggatcgtgcgatccttcatcttgtatccagcaagaagcgtgccaatttttacccatggatgaaacacgatggttatcaattcattcctgggaccattccggaaacggccttcctccatattcttacaaatccataaaaaagggacagtccattacgataatgtaatattgttagtttataaataacaactgttaacgaacaaaataaacccttagacatttccggaaatcatggtaggatcacgccctgttgcgaaaaagtttttaacatctgtgcaactttttcattattgcgaagtatattatagtcgtgaagggattcatcaaactcatcatcgtcattgccgttctcggaggcatctggttcgcctgggaacagtggaaggggaacgaagcgatccaggtggactaccagacagagcctcttgagaagggggacctgatgatcaccattgacgcgaccggcgtcacggaacctgatgaactggtggacgtgggcgcccaggtcagcggcatcatcatggagttcggcaaggatctggacggcaaggtggtggattattccagcccggtgaaggcgggccagatgctcgcggaaattgacaagctgcccgtgcagctggacgttcagcgtgcggaagcctccaaggcgcaggccatcgccggaatcgcccgcgccaaggcggacatccagcaggccaaggccaagcaccagcaggccaggctggaccgcgaacgcgcggaaaagctggggccaggggatgccctttccaagtccagctacgaccagtacattgcggatgaagagaccgcacgcgccaacgtggccgtggcggaagcctccctgcaggaagcggaagcttctctgaaacaggcggaagccgcgcttaagaaggaaatgcgcaacctggaatacaccaccatccagtccccggtggacggcgtggtggtcaagcgcctggtcaacataggccagacggtggtttccagcatgagcgcctccagcctgttttacattgccacagacctttccaagctgaaaatctgggccgccgtgaatgaggcggacatcggcagcatccgcaaagggcaggaagtcctgttcaccgtggacgccttctccggccgcaaattcaagggaacagtggacaagatacgtctggacgccactatgacctccaacgtggtcacctacatcgtggacattgacgtgcccaacccggacaagctcctcatcccctacctgacggcaaacgtccaattcgtggtggaggacatccgggacgccttcctcgtctccaacgccgcgctccgcttccgtccggaaacggaactggtcagcgccgagcagaaggcggcctttgaacggatgcagccggaactggccgctcccgcccaaaacggccagaagaaaaaagccgtggtctgggaactgcgggacaatcttctttacccccacctggtcaccaggggggaaagcaacggcatgctgacggccatcacgggagaaacgctccgggaaggcatggaaatcgtctccacggcgcagatactgaaccgctccggcaactcggaggacggagcttccgcctccgccggcggggaaaatccgttcgcgcccaagatgccgccgcgccgcaagccgagcacaggcaacacgaaggctccctccgcctccggcaacggcggcccgcccccgcctccctgatccggggaaacgcctccatccacccgctcaaccattcctttttaccgcttcaagcactacaacaacgtgatccgcttacgtgacataaccaaggtgtaccacctgggggaaatagaccttcaagtgctcaagggcatcaccctggacatcaaggagggggaattcgtctccctcacgggggcttccggttccggaaagtccactttgatgaacatcctgggttgcctggaccgccccacctccggccattactacatcgccggggaagacgtagccaaattcaacgccgcagagcgcgccacgctccggaacaagcgcatcggcttcgtcttccagaacttcaacctgctctcccgcaccaccgccctggaaaacgtgatgatgcccgccgtgtacgcccaccccaccctcagcatgaaggccatgcgtgagcgttcggtggagctgctgaacctggtgggcctttccgaccgcatggaccacaccccggcccagctctccggcggccagcagcagcgcgtagccatcgcccgctccctcatcaacaaccccagcatcctgctggcggacgaacccacggggaacctggactccaccacctccaaggaagtgctgcacatgttcaaggacctgaaccgccgccagggaatcacggtcatcctggtgacgcacgaccccaaaatagccgccttcacggaccgggccatcaacatggcggacggcctcatctgcgaagggatttccgacacgctaagcaaagacgacgtatgaaattccttcccctccttaaaacctgcatcaaggccctggtgcgcaaccccatgcgcgcggcgctcaccattctgggcatcatcatcggcattgcagcggtgatcgccatggtggaaatcggccaggggtccacgctccagattaaaaacaccatcgcctccatgggggcggatacgctgaacatccgccccggcgccatctccaagagcggcgtcaataccggcgcaggcggccgggcctccctgaccaacgcggactgcgaggccatcgcgaaggactgccccatggtcctgcgcgccacgcccgtagtgcgcgccagcggccaggtcatttacggcaacaagaactggagcccggaaaccgtggaaggcggttccgtggaatacctgaaaatcaagagctggtatgacatggaccgcggccagcccttctccgaggaagacgtggagcaggccaggcgcgtgtgcgtcatcggccagacggtagccagggagctcttcggggatgaagacccgctgggcaaggacatccgcatcaagaacgtcatgttcaaggtcatcggcatcctccagaaaaagggcgccaacatgatgggccgcgaccaggacgactccatcatcctgccctggacgagcatccgctaccgcctccagggcctgggcggcggttccgcctccacttcctccggcaaatccaccaccaccttcaaccgggcggacaaatacaccgccaattccgtggattactacacggaaaccacggaccagccctacacggacgccccccacccgcggcgcttcaacaacattgactccatcatggcgcagattgcggacccggagcgctcctccgaggcgatcgaccagatcacggaagtcatccgcgccaagcacaacctcaaggacggccagctggacgacttccgggtatgggacatggctgaaatgtcccgcgccatgagcagcaccacggaggtaatgaccaacctgctgatgatcgtggccatgatctccctggtcgtaggcggcgtgggcatcatgaacatcatgctcgtctccgtcacggagcgcaccaaggaaatcggcctgcgcatggcggtgggcgcccgtccgcaggacatcatgcgccagttcctgctggaagcggttctgctctgcgtggtgggcggcgcgctgggcatcgcgctcggcaaggccatctccatcatcgtcagccgcaccatgaactgggccaccgcctcctccccggaagccatggccctggcggtgggcgtctccgtgttcatcggcctggccttcggatggtatccgtcctggaaggcgtccaagatggaccccatcgacgccctgcgacacgaataacaccttacttcttcctttcccatgtcatccatgttcaaacatctccctctcctggccgcatgctgcctgagctcctgcatggtaggcccggacttccggccgccggccaacgacctccccgccgcctgggcggagagcaggcccccccgcagctctgacaaggacctgcgctcctggtggaacatcttcggggacccccagctcaaccgcttggtctccgcctccctcaacaacaatccggatatgaaggtagccctgctccgcatccgggaagccagggaaaggctccgcgtctcccaggcctccctgctgccctccgcggatgccagcgccggctggagcctgtccccggaccggggcttccgcagctccacctcccaggacttcaccctgggggcgtccacctcctgggagctggacctcttcggcggcaaccggcgttccattgaggcctaccgcgcctccctcatgtctacggaagcctccgcgggcgccgtgcgcacggccctgctggcggacgtcgccacggcctactttgactggatcaccgcctgcgaacagctccgcatcgcccgggaacagctggaaatccaacgcaacaccctcaccattgcggaaaaacgctacaaatcggaattcgccccccgcctggacgtggaacaggccacctccaccgtcgcctccacggaaagccgcatcccggcgctggaagcacaggtggcctccgccaaaaaccagctctctgtgctgctgggcacgtacaactcccgcgtggagctgacgctccccaaagcctccgtctttgaaaaaacgcccgtcgtgccggtcggcctcccctccgaactcctgcggcgcaggcccgacgtcatcgccgctgaagcggacctgcacgtggccgtagccaacgtaggcgtagccgtggcggacctgtacccccgcttcagcctgacgggatccctctccagccgcggcggagacttcggccagctcttccgggaaaacaacaacgcgtggtccctgggcggcaacctgctccagcccctgttccagggcggagccctgagagccacggtgcgcgcccagaaagccgcggcggaacaagccgcggaaacctaccgcaagacgctcatcaccgccgtctccgaggtggaggacgccctgatcgcctacggcaactacacctcccagatgcaatacctgcacaaggaaaacaacgccaacagagaagccttccttctctcccgcaccctgtacatcaacggccagacggacttcctgaacgtcatcaccgcgcagcgctcctggctcagctccgaggaatccttggtcaccatgaagcagaacatccgcaaagccgtcgtgcagctcgctcgcgccctgggcggcggatggtaaaacctgctccattaagtaggcaagaatttccatttctgaaaaacgggactctgattgttgaataaattgagaattgccgatctttcgggtcagattcttgttttcgcattcattgatcctgtaaaactttccggttcccggtaaattcagctaccaaatgaaattatgatgaacctcttggcccataggtttgaagctccttgcttctccatttctacagaaaataaatcaaaaggggaaaataataaaatcatttgatacggatgcctcatgcaactgtaaactgtacctggattctgtgaaatgagaatggaagcaagaatgttcagcaacaggtaaaaagaataccgaagcacatcaaaatcggttgaagtccggcaaccaacaatcagacaatcactgtccttgttattaattgatgaaatgccaggcagaagagatttgtcatctcttctgcctgtttttaggagtgtgattactatctcaggaaaagacggtaatatttttgacgtctccggcgtgtttactttgctggtttttgttctcatggtaaccgcaaccatttaataattttaccttcattaccatgaacaacactttcaacatcggcgccatggacaccgtctatcccttcattcccatgtaccccaacgggcagccccagggcgacttcctggtcaacggcctctccgctcctgtccttatccccaaacgaactgcttcctcccccacccgtcacgaatggttcgggtacctcaaggtcatggctcccgccacctgttttctccacctccacgcccactcttccatctccctttccattcccgccaaggatatggaactctccacggagccgggctcttccacgcctctccgccgccagatccagtttgaacagggatactactggtgccatatcgtccaccaacaccagcctgccgcggaggaccaacaggagttctgcattgccctggtaagcgacaaggaaggagagcccgacctggactattacctgctggcggaaaacacgcctgccggcaaggaaggagaaaccgtcctgactctggtcaacctgtaccaggaggtggaagaaggagattcgtcgagcagttcggcagggggaggagattcgtttgagtttgatcccaagcccagcagcagctcgagttcttcttccagcagttcgagctcttcctcctccaacagttcgtcttccagctccctgcagagttcttcggctcccgagcctccggattcctccagcagcgcgccgccttcttcttccagttcgtcgtcttccagcagttcgagttcttcctcgtcatcttcttccagcagctggtcgtcttccagtttccacagcagttccttgccgccccaggagccggattcttccagcagcgctccgtcttccagctcctcctcgagcagttcgagttcatcgtcttcttccagctcgtcttccagcagcagctcttcgtcatcaagttcttcgagctcaagctcatcttccagcagcagttcaagttccctttcctcttcttccagcgagccggaccaggaagaggaaccctgcccctgtgaatgtgagtgcaatgaggaaggggacgaacactgtgtccagacacagcccactccgggggatcccgagggagagcaggattgccagggcaacgcctgcatcaacccttcctccccggcaggacccacgcctccggctcccgccaagttcatcaggacggcacgctctgccaccactaatgccccggcttccagcggcttttccatgcgctacaaccaccccatggcctggagcgcttccttctcggctgacgagcgccgcgtcaccgtcaagcgcccctccggaagccatctctatttcaaagctaacgagggaagcagcgatgcttctcccatcggctcttccaggaaggtcaactaccgtgtgaggcttctcaacgaagatcttactcccaacctccagggtactcccgccttcatggacatggttcttcccggcggcatggtcctgcgcttctcggcagccaccggagaggtcgtgtcggtcaccagctcttcgggccatgtgatctctgccgaggagtacttcagcaaggtccaggtcacttaccatcaaaacggctcccttgccagcgtttattcccgcgcccaggggttgatgagaagcattcccgaaggcgacaggctcaccctggagtggtatgctcccggcaagaccatcccagacggggaaggcggattcaccgttaccggagagccctacaaaacggccgtctatgaaacctcgcttgaaaacggagtcaaggtcacccatatcaccaaccggcgcgccggtcaggagccgcatttcatcgaacgccgcgaagaaggcaacaaggtgaccatcgtcaagggggagggagaggagcgcatcgttcgcaccattgaacgcaatgcattgaccgactccaagtgggagcgcattgaaaccatccagggcatcaacgaggaagcgcccgcctcctgtacccggacagtgaagaagtataccgacggcggctggctgaccatcagccggacggagggatacaagacccctctggcccggaccaccctctatacctacaacgaccagttccggatgtccctggaactcaagcccaatggcggctatacgcgctacgagtacgacgagcagggacgagtagtgctgcaggcctctccctgggccggaggcggtgaaaagggaacacgcacgacttacgccgacttgcgctttaacgacttcagacccgccacggaaactgaagtaatcattgccgaggacgggacggaaacggcgcttctcaaacgcacttacacctatgaagacagcccgcaggtgaaccgcaccacggtcacggaaaccgcgctgggaagcgaccaggttcatacgagtgtagaagagacttatggggaaggagccgaatatccctacgcccggggcaggcaaaagatgagccagagtattgacggggtgcaaaccgtttatacttacgaagccgccgcggaatacggagccattcaccaggtgacggagaccgtgcaggccaacggaagcatcgttccgggacaaagcacacgaaacgtggaatacatcgctgaaaacggcgccaccaccaggagagaacaatacgttcacaccggagaggactggtcgctgattgcctcggaggactacgaatacgacgacgagcagaggctcatcaagacgaccaagggcaacggcaggaccagcacgacggagtggatgtgctgcggcccgttgagggaaaccgacgaagacggcatcaccaccggctacggctacaactcggccaagcagctggtggagactattcgggctgcgacggaaaccacgcccgaaacgattatctcctacacgaaggatgcggcgggaaggacgatcgccacgcggcgtgacgtgggtcccatgacggcgacggaaagcacggagtacgacgatctggggcgggtgatttcttccacggacatgctgggacgcaccacccgaaccgggtacggcgaagacggactcaccactaccaccaccaccccggcaggcgctacgctgattaccaaaaagtactatgatggaaccatactctggcagggaggaacggggcaaagagaagtggagaccaagctggagttgagcgaagaaggcatcctgaccacgaccttgtccaagggagttgtgctgtcgcggattctgaaaaatggctttggtcaaaccgtccggcaggaacatcccaataccaggggcggctttatcgtcaccaggaacttctacaacgacaaaggacaatcggtccgctctcaaacggaggatcttgctcctaccctcacggattacaacgaactggggcaagccgtgaagcagaccgttcttctggatgaacttcatcccaatgacaccaccagaaacaggatatcggaaagttcctcctgttaccgggttcgggaagacggcgtctaccaggtgcagacttccaccacctgcaacgccgacggattccccctcacccagaccacggaaaacatggtttccagactcagcgctgtactggaaaacaaatccatcaccacggacgtctacggccagcagaacatccagtggacggagtacacctctccaaccaggcgcacttggttcagccgcattcccacttcggagatcacagctgaatcactggtcgtggacggttttgagaccagccagaccgatcacgctggaatccgttcttcacaaacccgttcctacgcctccacgggcatggttctcaagcacacggacgccagaggcaatgtcaccaccacggaaaccgaccttgcgggacgtactgtcaaagtcaccgattctgcaggcaacgtgaccaccaacaactacctgccctgctgtgacaatcccgcctgtatcaccgatgccctggtgggaacgacctgctattcctatgacatccgcggcagaaagacagccgaatatggcaccgccattcagccggcctgcttcgcctacgacgaagccgaccgcatagtggccctgactaccttccgtgcaaacgaaggcgacatcacttccgatccttccggccgaaccgacggagacaccaccacctggctctatgacgaggccacggggctggaattgaaaaagacttatgccgacggttcctgtgtttccagaacctatgacgagctcaaccgtcaggagacacttgtcaaagccagggggcttgtcacaacgtataagtatgctccctttacaggagaactcatctcggtttcctacagcgatggaacttctccctggatcttttcatccaaccatctagggcagataatctccgtctatgacgcttcgggtctcagggaattttcctatgacagctacggcaggatgattcaggacacttcctttggacaggtggaaagttctcttcaagaagaatacgatgcccaggggcgttccaacggataccgcctgatgctcggcacacgcaccgtgcagcactcccatcttgactacgattccaaaggcggcatgattgggatgaatctggaaggcatcgcttctccctttacctggcagtacgatccaaccagcggcttcctcaaccatctcacctaccccaacggcatggtccgccaaaacacctaccatcccacactcaacctcgtaaccgctatcggttataagatggagggaaatgaggaaacagttgttgggcataaatatcagtacgacgcgctgatgcgtcccgtccagctgcgggactcgtgggatgctaccactcctgagacgataagagattttacctataacagccgcagtgaactgctggaagaccgcatcagccggggaggaagctttgcgtactgctatgacaacatcggcaaccgcaaaacagcccgggaactggaggaagaagtagcttatgaatccaaccggctcaaccagtacacggatattgccgggggagaagaagattttaaccccgtctacgatgccgacggcaaccagacccgcatcaggacctcaacgggcatatgggaagtgtcctacgacgccaacgaccgccccgtcgtcttcgccagccaggatggcagaacaaccatcacctgcggctacgactaccagggccgccgctttgagaaaaaaatcactatcaatgcagttacctcttctcattcctactatttataccgaggctatttacaaatagctgagctggatctgatgcactcggaagccatgctgacgagaacccatgtatgggatccgacggtgcgtacggctacacgcgtcctgatgacgaccagatggaaaaggggagtgacaacggaagagaatttttatttcatgcacgatgctcgaaaaaacgtgacttccattttcgacggccaacgaacgcgaagagcccgctacgagtatgctcctttcggcgccctgcttacagcggacggagacatggcacaatccaacaagttccgtttttcctgcgagttcacagacgatgaattagggcttgtctactacaactatcgccatcttaatccgctcgacggtaggtggatcaacagggatcccatacgggaacaggcaggacgtaatctttatggatttgtcagcaatcattgggaatgggatttcctgggacttcttctaacaaaggatgatattaatgtcactggaacagatgaagtaaatgttatagaaacgcctgctggattcattccagaaggagtgggagaagattccatatttaaaattcaagctactgatcccaacgtttttgcaaatactcaagtaaaaataaaccgggcatcaatctctgttatatgtggtaaggcaaaagctgccaaagcaagcccgtgtgaagtaaaaagtgtttctctccaagccagtgtgattattgtgattaatcagccggaagatttgacgtattataatattgttgcggagaatggcatggtttttaaaatttcaagtgactatgtttacaaatctgttggcgctacgaattccagtgtttatgctccatatgactgggtttacagtaaggagatggatcatgtgaaagattttaaagcttggttagccggggaggaattgaaaactgcaattgttgaagaattgagtaatggcattatttatttttttacctatggaagttgcaaagagaatgcaactaagcgtactatttctgttctggataagcagtacaatacggcaatagcaaacacaaaagaaacttatgacaatggtccaaatgctcctcatacttggaaacgagtgaattatccagaaatttctgatgagattgcaaatatagtgaaggatcaagttgagggtgctcttttaccaagataagaaaaatgatgaaaaataaattcatactggaaatcatctgtttaatgctcttttttcctattcatgccggggcatggacagttcagaatgaaataagaaatgaccgaacctcaataagtctacaatgggtacaaacgtcatttgctggttgttttgagagtttgccctcttctgtatggagtgaacgcttgattccaaggaaggttgaaggggaagtgtacctcggtttttttctggagaacgtgtcttcatcaaatattgccatttccgatgtatcttttgagacgttcgaactttttcggaaagaaggaaaacagtgggtaagagtctatccagagcaaaaattagggcgttgcggaataagtttgcgtgaagaaattgctcctaagacaaaaatgatgatcttctttgccgtaccttcttcacttcttgcaagtggttcgtacatgatcaaaagctattgcaacgttgaacatgacgacaacatgctgggcactatatcatggctgacgggaatatttgtaatccccaaaattttggaaataaaaagttatggggatacaaccggccatgagggaatcttagaatgtaccggcatcgtagctgatgaatcgtcgcggacccctcaattttatttgtcagtcgttttaaagaatgagacggatcaccccttacaggttcctttaaccgggtatacgggacctttgaacgttgacatgaattttcggttggtggaagtaatggagaatcatgaaaaaatcatcggggaagctggcagggaaacaaaaaaagaagacaggaaaattctgttgccgggagaacgtttgtacattcgaagtgacggatttcagaagtatacggctgacgcgcacgatcgaaaattcttcaatcctctaaattggaaggatttgattggtaaaagattgaaagttacatccataaaatggagttctcaggaattttctatcaatagacagggaaagctggtaaaagcggaagtcaaagaatgaaattggaaacgggcttcttcaagagataaaaataggttattttctactgcggaaagaaaaatccagcttaaaattgttcaatcgaaaaatcttgtctattcccttggagcgaatctgggaattaaaagcaaatcaagggacttcatccgcttaatgttttctatctagctgctatggaaaaggaagcggcattgacaagaattataataaaaacgttctactggacagcaaaagggactcaacaaaatacttcctcaccttaatggagaaggtggaagacgctctgattgcctacggcaactacacctcctagatgcaatacctgcacaaggaaaacaacgccaacagagaggctttccttctctcccgcaccctgtacatcaacggccagatggacttcctgaacgtcattaccgcatctcactgcactatcccttgcggatgggcagcgagatgcgcttttacataccggaatgcatcaagacatgctgccggaaaacaatgaccagcattggaattttcatcatcccacccctgtttgaaagaagcatgaataaccgtcttacaaatatcactattgttctcctcgctgccgtctcactcgtggaggggagcattatctggcatgaaaagagcatccgcctcgattctcaaaaggctggaacggaagaaaaaagcgagtgtgccgaccatagagatgacgatttcgttccggatatttcttcccagtttccccatctctatttcaaaaaccaggaaacgcaggactctctatctgctgaagtaggaactcttattattgaaagaacccaatccagacaatccgctgaaaatagggaatatgccgagacggagacgcattttatcaatcccaatgaaaccgctcatcttcctccggaaataaaaaatacgtctgtcttatccattctctggacatccgactccgtcaccaccaaaacggaagagaattctcttttcatggaaatcggcaaaaaatcattatcccctttgaaactaacactcaccctaagggccaaagacggaatgggccgggaatggaaactggcatgggtgaaagcaaatgaagattaacctgatatccgccgcatcaggaacacaagctcccgtcaaatcatgtaacagccactgaggcgcgaataggactctattaccatacggaaaaagatcatcacacatatataataatgaaaacctttaaaacgatagcttcacacaggacggaatatgaacatcccatcaaattgaaaaagggggaaagcgttacgctgggggaaagagctccggaggaaaactggaaggactggatatgggcggaaaacagtaaagggacaggaggctgggttcccgttcaattgattgactttccgggagacggaacgcggggaacggtgctggaagattacagcgccagggaattggacgtagacccgggggaagatatcctcaagatcaggacgctgaacgggtggacgtgggtccggagaacaagcgaccgggaggaaggctggatacccaatgagaccattggagagggagcggcgcaggcttccgaaaacaaccgtacttgaaagagacggcgcatacggaaaatctccctcctactcaggaagaacggtttttcttcctctgtcctccggttctttccgggagaaaggtcaggcccccggcctctcctccatttccttcatcactgcgctgataaggttccgggtcttcacgccgggcagcacgttcaggtccatgcggttcatcgcgtagccgaaggagaggccgcagaccgggtccgcaaaggcgtgggagccgcccgccccggcgtgcccgaagccgccggaaccgaacaggcggcgcagcttgcggcccgtgacgggatccgcgggatcgtgcatgaagccgcaggaaaaggcagtgggcgttttcagggtcaggtccgggccgtcaatgacaatgtcctgcatccagccgcgcacggcggaagggaatatccgtagttcatccagccccaggcaggcctggtagaattgcgccatgccgcgggcggaggccacgccaccgaatgccggggctccggacgtccacgcttccggcgtgttcatctggcgcacgctgttcaggcctgtcagggtgttgaacgcgcggttcacgggcgttcccttcttcatgtattcctgataaaacggcgtgcccatgttggacatgtccatcttgccggggtacaaggtcgccacccggctgaattcggattccggcaggcggatgtaaaagtccaggtccagcggcgtacggatgtattcctcccagtaacgccaaaggcgttccccggtcaggcgcagcatgagttcatccagcatcacgccgtaggtatgcggatggtagccgtgctccgggggctgccacgccggaacggtttcctccagggcgcgcacgcagtcctcatggtcaaacacgctggccgtccgggaaaaggctgccaggccgcactggtgggacatcatctgcgcgatggatgcgtaaggcagcgggaattccggccacagttcccccatgctcatctgcggtgaggctccctgccggtgcagggccagcagcagggcggcggaagaggctcccttagtagcggagtaaacgggcaccagcgagtgttccgtccacgggcgcgtttcatccgctacggcaaacccggaatgaagggaaacgatttcctttccgtccttccagacggaaacggaggcgcccagttccccgtagtcacggaagttcctttcaaacgcttcaactatctgacggtcactgttcatccccttaaacaccccgtcgctacctccggagtccgggcggaaggttactccccccggtcatgtaaagcaagccccggccctgccttgaaaaagacccctgaaacagagggcgggagcccatagaacgcggcagaaggaaagttttccggtaccttgcatcttccacttcctcctggcgcagcctcctgagtcctccggggccagccactccggcatcaagggagaggagttgcaggcaaaagaaaaagcgcatcagacacgggagaagaagcagttttccatacgatttcccccttccagcgatggcatgctgctcgcatcatgcctcccgcgccgtacttcacccagctttgatttcatgaagggccagcaccagcagccggctgccttccaccctgaatttcacctcccagccggaaaacaggaggccgtaaacccgttccggatcgtcctggtactgcgggcgcggatccaaggccagcgtatccgccagcgctttccgttcctccggggtcatggtgcagccaagagcggcggggatttccacgtccagccgttcatagggaacagccgtaaatccttccgaagcctccggaatgcagtccgccagcggaacatatggcttgatgtccagaatgggcgtgccgtccaccagatccacgccggaaaggtgcagcaccgggccatcctgcgggtgcagttccaccttttccagcctgacggcggacaggccgatggggttgggacggaacggcgcgcgcgtggcgaacacgcccatgcgcacgttgccccccagccgcggaggccggaccgtagggctccatccctcgtttacgctttcactgaatacccagatcagccacaggtgggaaaacccttccaggccgcggacggcatccggatgacggaacggcggctcaaataccagccgcgcacgcgcacccggaaccagcccgctctggcgcggtacgccgaacttgtccggataacacgtgctgacgcgggcgacaggatgcaagcggcagttaatagctaatagttaataattaacagtctccggtctttctgcgttacgctttcgtcagaagcagtggagctgttctccgagcactacggcttccaccttccctttcagggttttgcccaggaaaggggtgttccgggcgcggctgcggagcgtttcatccgtgacgggcgtttcaccctccgggtcaaacaccaccagattggccggagcgccttcttccaaagaaacgggagccagccccatgagcctgcggggagcgtcactgcaggcgcgcgccaccgtctgccaggacattttcccgggttccactagatactggtaaatggcgggcaggaacgtatccagcgcaatcatgccctgcggcgcgacgacgaagtcctgaagcttggagaacggcgtgcagggcgtgtggtcggagacgatgcagtcaatggtgccgtcattcaccgcggcgatcagggcgtccacgtccgactgcccgcgcaggggcgggagcgtcttgtagttggtatcgtagcggcccacgtcttcatgcgtgaagagaaggtggtggagcgccgtttccgcgctcagcccggcggtcaccggtttgcagcggcgcaggatgtccacgctgccggcggtggaaacggtctggacgtgcagggagttgcccgtctccacggaaaggcggatgatggtttccatgcctatttcctccgcgcaggagggagagcccgtcagccccaggcggtaggaggtggtgcccgggtgcatggtggccttggccgtcagggacggcacgtccccccgcagggcgaaggtgaggttcaggttgctggcgtactgcatggcgcggtacagcagcagcatgttgtccggcgtgcggtccccgtccgtgatgaagcgcacgcccttggcgcgcagggagtcataggaggcctgctcttccccgccgtcccccttggtcaggcagccggaggggatgacctccaccagcgcgtccgtgcggcatatttccatgaacgtggtgatctgggcggcattgtccatcacgggatcggtatccggcatggccatcaggccggtcacgccgccatgcagggccgccgcggtagccgtggccacgcgctccttgtcttcccgtccgggctggcacaggtgggcgtgaaggtcaaacaggccgggcagaaccagctttccggaggcgtctagcaccttttctgcggcatcctccgggagcgtcccggcgggggcctttgcggcgattacccctccggaaaccagaagatccaccggagcggaaccgtccgccgtccgggcattgcgaataagtacggaagttttcatgagcaatcagtgctgggtttgcggggtgagatggtaaaggatggacatgcggcaggcgatgccgttttccacctgccggttgatcaggcagcgctcataatccatcgccaggtcgcagatttccacgccgcggttgactgggccggggtgcatgatatacaggccttcatctgaaatgcgcttcaggcgttcttccgtgacgccgtaaatcttgttgtattcccgggcgctggggaagaagggggcgtcctgccgctccttctgcacgcgcagcaggtaaatcacgtccggcttccaggcgaacgcctcgttgaaatcggaaaagcgcgggatgccggagtgctccgtgcgcggcaccagggagcccggccccaggtaggccacttccatccccagcctcttcatcagcagggaagtggagcgggccacgcgggaatgcaggatgtcccccacgatgagcacgcgcttgccccttacctccggaaacacctcccggatggtgaaggagtccagcagcgcctgggagggatgggcatgggccccgtccccggcgttgatcacgctggcgcaggtatggcgcgcaatcacattcggcaggccgctgttgtaatggcgcacgatcacgtaatccaccttcatggcctggagcgtggcgatcgtgtcctgcacggattcccccttcaccacggaagaggtggacaccgtgaagttggtcacgtccgcggacaggcgttccgccgccacctcaaaggaggagcgggtgcgggtgctgggctcataaaaaagcgtcaaaacggacttccctttcagggcaggcacctttttgacgcttttggtgaagagctccttcatcggaccggccgaatccagcagcgtatgaatttcctcgtcagtcaacgaggagatgttgagaaggtccttgcggggattcatggaaaacgggtaatggattgaaaagtgtctagtgggaggagatgattacgcggtcctcgccgtcggcctccttcatgctcacgatgaccttggctccggcgtggtccagcacatggcccgtgtaatccggctggatgggcacttcccgccctccgcggtcaatcaggcacgccagttcaatgcgggccgggcggccgtagtcgaagagggcgttcagggccgcgcgcacggtgcggcccgtgtagaggacgtcgtccaccagcaccaccctcatgtcatccgtggaaaacggcaggttggaggaacggagggaggggcgggcctccagcttgaaaatgtcatcccggtacagggaaatgtcaatggcgccgtactgggcttccacgcccagctccttcaccttgtccaccagcctccgggcgatgacgtccccctggctgagcaggccgacgatggcgagcggttccccgggaaagcgggccacgatgccgtgggccatgcgctccagcgcacgggaaatccccgggccgtccaacacgatttcctgtgacggaggaggagtcatctgatgggaaaggagtgaacgttacaggccggccagcttcaggatgcggtgggcggccatggcggcattgacgggggtcttcttgtgcaggcccaccgtggtgcagggcactccgcccgggcactgggcgatcgccagcagggcgtcaatgccgttcagggggcctccgggaacgggcacgccgatgaccggaagggagcagctcatcaccaccacgccgggaagggcggcggacagcccggccacagccagaatgacggccttttccccgctggcttccagctcacccaggaacttgaccagctccgggaggtcgcggtgggcggacaggacggtttcttcatacggaacattctcctgcgcaaaatactcgcgggcgggttccataaagggcttatcattcgggctgccgtagatgacgatgactttcatggctgtgtgtgcggttgtgaaacttgcagattatggccccaagccccctgccctggcaagacttaaccttcaaaaaaaacggcgggggccgcgggcgtgaaggatgcccggacggaggcgcaaaaactccggaacggcctcaccgggcacacgccttttcccccatttcacccatctctttcatggtctgcctgtgaaaccgcctcttcccctgttccgcgtctccactgcccggagcttccggaagggtctcccgcatcctccggaataaccgccttgcctgactcaaggtcctttttccactggtaaaggcgcttcaaaaggtcaggggcgctttccccctccctcttcatcgtcccacggtccagccagtcaatcaacgcattcatggagcggcccaaatcatattgatggtcaaaccgttccctggcctcgtccagactggccatgagattctgcacaacggatatgtctttccgggaaaaatctcccttccagtattcatccaccatcttcaggacgtcaatatacgactcccggaaatcaggcggacattccgcctcaaaccgttccggcatgaggtcaaacatgcttttactcctgtcaccggacggagttccccgttccagggaaataatttcacagcacaattcaagcatgacacggtacttgaggatagccgcgcgggctttcctgaactgctgcacttccaaatccacattcggcatgagcggttccacaacgtcctgtccgctcaatacgccacaaccgcatccccatgccatacccgccagggaaaaccatttgaataatttcatcgccttttcagcggtgaaaaccttttttctttcccgcaccggaaacagcaacaagcccagccttctcatccttccttcctctcttgggatataaactccacaggaacagccagtttcccggactccaaatccttcttcaaccggagcaaatccttcaggaatatttcaggggcatcattccttttcccggtctccaaccgcttatcaagccattcattggacaaataaatcgctcgttctattccataccgctcatccaggcgtttcatcacagcctctatcgcagcacattcctttttcccttgcggcgtctccatccattcgggattttcattcaacgcggcttttattttttccacatgctccatccattctttccggaacatctccggacacccggctgaaatattttcaggaagcagattcagcagccgcttgcaaagcagccccgcattaacatttcccttaatatcagattccaggatggcaatccgcccgcacaaggtccagaaaaacatgtacctggcaacggcggcacgttcccgggcaaattccggcgtctgccggtacctgtccacattcggcatggagggtgacgccacatcctgcccctgcgccattcccaggcagcagcccgccaagcctgcggctaaaatcagcttgatcattagttgataagagcatctgccggggataaagtccatccttattcctccttctccccacactttttctccggagagacagccccttctttttccggaggaggaagactgcgttccacatcctccatctgctccatcagggccgtgatgagcgcttcccggtctgtggccgctttcatctgccttctgagctcccggtccacctgctgaaacctttcggaaagcggataccgggaaacgacgggaagcagcaattcattgcatgccttaacataaacgccgtactcccggatcaattcctttcccgccagcttctctttttccatacgctgaagaaaggccttgctcatggcatccaccagccaaaacaccttgcggtaatccgggggacattcctccaccagtctgacgggaacggctatgtacgattccaaaaaagcgcggtgcacgccctccatcggcatccggtccagcagcggcgcccttttctccagatacagcatgctccacatcatgagccggataatggcgtcccggtccctgaacagtttttcctccgcactctgcgcctcccgcacggacggttcctgcgtaaaagcaacatcctgcccccgcaccattcccagccagcatgcccatgccagaactgcacagaaaactacattcagcatcatcttatcaatccggtttcttcttccattccttcattttcccctgaatttttcagctttccggcaatcaggtcgtccttcattcgttgaagcgccttcatgcgctcctccctgttcaatcctatcaccttgctttccagcatccggaaaaaaagagaactgcgttccctcaaacggtatttttccatcatgggagcattcatttcattgcatcggttgcaatattacttaaaaaccttgtcgaattgttcatcatccattttttccgtcttcatcctgtccagcagtctggcggattcttccctgcacgcctcaaaggttttccggtaatcaggcgggcacaactccagcatccggggaggcggcgcagagttcatgcgaacaatcatggcggccacgatttcccgtgtctcccggcctttcatctccagccttatcatcgttcccagaacgcatcccagcatttccacccggtcaatggcttgctgataccgttccagggccttcccttcctccgtctccaaatccacgttcgccatggaaggcgccgccacatcctgggacatggcggggaacgccgtcaggaatgcagaaaccaccacccgccggaacagacttaacatgaaaccacgttacaggagcccttcacatgcggtcaacattattctccctgtccgctactgcggaaaaccagacaggcaggtccgcagcaaccacagcaaacgccctgaaggcaacgaggggggctgcccggtaaaaactgctcttcctcctctcgccgcccagcttctatccctcctgcttctgcatgatttccgcaggaataaccacttctccggattccagcttttccttgattcctttaagacgtttgagcatttcctttttgccggcgccatcctccatctccagggcagaaatacccgccttcttcatcatccaacccatcaccggctgtatcgcctcctgcaccatgtatttttccatcagcaggcgtacgtcttcccacgcacccatctccaagtctccgggaacggctccagactcctccatctttttctcacacgtatccttccattgccgtactgcgcatctgaaatcttccggacaccgggcaagcgcgttcatgggaatgaactcccaaaaatgttttattctcttttgcagatccattttctccgcaggatcctcttccagcattaaaatcatctgattcaaaaccagtacaaccataaaaccgcatatggcggcacgctcctcctgaatttttttcccggtctcggaatccaaatcaacgacaggcattcccggtgaagcaatatcctgagcacgggagaaaagagggaacgccccgcataataataaaacaatcaataaaaagcgactcatgccagccatattcacagcataccacgggaccgtccgcgggcaataagttttccgccattccgtgccggggccgcttcttttcccattcatggaccttcccgcacagccgcccatacgccggatgccgtggattccgggcatccgccgcaacaggcttgccctttcttccggaaaaacgccggagcggaacaactaccggacttattcctccaccgtctccggcatgacgaggcgccctgaacggacatgatcgcgaaattgcttgaacgcttgggcaaacgagtcctggtccatgttgccgcgggcgttgacttcccgctccatccagttcaaggcctggcggcacatgtcctccatgccgtattccgccagaaaggccagaacctccgggtcttccggattaaacggctcggactgcaaatccctttttccgtccgccgcctctttcagagcctgaaccctggcattcatcagcttttggagcttttgcgggcattccttcaattcctgttcaggaaaagccgccagtatcaggggataaaggtccttttccctgaatacctcgccctggttttccacgaccggcaggagaacggctaaataaagcagcacgaagaatttgcggatagtcgccttctccgccgccagcttctgcccggaaggcgtttccaaatccacattcggcattccgggcgccccgacatcctgggcggcaccggacagcgcaaacagcacggggcacagcaataaaaagttcaggggcattctcatggttcacttttggacagcggggcttcccgatcgttcgaaatctgcggtaatcccttgttcctttaatattttacgtttccgggacgtcttcaccgggaaaacttaaaacctccacgttgcggaatgggagccgcggaaagcaatccatcccttccacggctttccgcacgttcgctccaccaggggcagattccgccaccgggcaggaggtaaaacggaagataacggctttcttctcaaacatcttccatcacctccccgtcctccatttcctcagcctcgccaatattttcgggaaccacgactttcccggcctccatctcctctttcagttcacggatgcgccgggctttaaacgcgggggtgtcacttttcctgaaacccagcctggaagttacccagcgtgcaatccgttcctcttcatccttcaagccgtacttgaacagcaaggcggccacttcttcatccgccacgtaaggccagacaatattcttttcaagcccgtccaggaattcctgtatcttgctcttttttacaacgaccagttcctgaaaatccgcaggacagcgtttcagggcattttccgggaattcctccaggattacctgataaaattccgtagccagtccgttgccgcctctgattattacttcaaaggaaggaaggttccggacaaggcacaactgggcaagaaagctccgaatttctttacgattcctttcccgcacccttccttcctccgtatcccggttcaagtccggcacggcgggaggagcaatatcctgggcggccgccattcccgataaacttaaaacgatcagaaaacgaaccatcttacccatgaagacaccataccacaaacatgcattccggcaataccgttcctccagccgcttccctaccgtcttgcacgccccaatcatttccggaactaaaggctgtttttacaaggccaacggcgggaatgccggaatttgcacggcaaagcttgaaaagggattcacggagcgccgcatccctcaacgggacatctgccgcgccatggcctccgcgcagcggcggccgtccagggcggcggaaacaatgccgccggcatacccggccccttccccgcagggatacagcccttccagcccgggatgctccagcgtggcggggtcccgcggaatgcgcacgggggaactggtgcgcgtctcgcagccgatgagctgggcggaggccccggcaaaaccgcgccatttatggtcaaactgccgcagcccttcccgcatgcgccagacgatttcccccggaagcagttcatgcagggggtgggatgtaatgccggggtggtagctggtgggaagcagggaggaggaaacgcacccgttcaggaaatcctccactttctgggccggggccttctgcatgcctccgccagcgcggctggaagcggtctccagcgccttctggtacgccacgcccgccagcacgccgtgctccctgcagaaggattccgtatcttccggatgcacgctgaccacaaagccggcgttggcaaacggggaatcccgccgggccagggacatgccgttgaccaccacctcgtcattttccgtagcggcgggaacaatgaagcctccggggcacatgcagaaggagtggacgccgcggtcccgaatggtggtcgtcacggaatagcgcgccgccggaagctgttccgggcgtttccggtccgggcgcagatggtactggcgggcatccacgaacgcctggggatgttcaatgcgcacgcccacggcaaagggcttctgttccagggccagcccctccgccagcatcatgcggtacacgtcccgcgcgctgtgcccggtagccagcagaacggcgtccgccgcaaattcccggccatccgcacagaccgcgccgcgtatgcggcggccgtccgcggaacggagcaaatgctccacccgcgcgttgaaatggatttccccgcccgcgctcaggatggattcccggatggctttcacgacgttgggcagcaggttggagccgatgtgcggatgggcgtccgtcaggatttcccgcggcgcgccgtgggccacgaaaatttcataaacatcccgcacggggccgcgcttggtcgcgcgcgtaaacagcttgccgtccgagaacgttcccgcgccgccttccccaaagcagtaattggaatcctccatcacggtgccctgccgcaggatgggggccaggtcaaaccggcgggaggagacggccttcccccgttccagaactacgggcttcatccccagctccaggcagcggagcgcggcgaacattccggcaggtccgaatcccacaatcagcgccaccggggcgccgggcctgacgggaggatagtcccgggaaagaggttcttccggaggcagcgggccgtccacccccgccagcagacgaagctggaacaaaatgtttttctgccgggagtcaatggattccttcaccagccgcaattccctgatgcgggagggggaaatgcccagcttttccgccacggcggcgcggcgcgcgcggtcgtcgccggccttctccatcggcagaatcacatccaccgttacgccttcccctccgttcatggggcctccttcctcggcccaggctgctgctgcgtgatgcagtggatggctccgccttccagcaccagcttgcgggcgtccacgccgactacctgttttccgctgaagcattcccgcagaatgcccagggcgcggtcgtcattccggggctggttgaacacgggaacgatgacggcttcattcacgatgaggaaattggcgtaactggccgggagctggtccagccgccagtcctccgcatggagggggtccggcatcgggaggggaatcacctccacgccggaaccgtccacgcccctcaaatcctgcaggcgttcattattttccgccagggcgcggtaatggggggaggatgagtccgtctccacgatggagaccacggcatcccggcacacaaagcgcaccatgtcgtcaatgtgcccgtccgtatcatccccctcaatgccggaaccgagccagaaaatggacctggcgcccagcatgcgccgcaattcctcctcaatcatggcacggctccattccgggttgcggttgggattcagcagcacggattccgtcgtcaccagcaggccgtccccgttgccttcaatcgcgcccccttccagaaccatggaggagctgcgcacgggaagccccagggaagcgccgatcagggagggaatgccgttgtccaggtcccacggagcaaatttgccgccccaggcgttaaattgccagtccgccagcatcagggagccgtcctccatgtcctgcacgaagacggggccgtggtcccggcaccagacatcgttggccggatggttgaacaggcggtactggtcctcccgcaccccggcggcctgcatcgcctgcctgatgcccggatgaaggggttccgcggcattcacgcacacgcgggcatgcggggcaatggcggcggctacgcgcccgtaggtctgctgcaattcatccaggccgccctgccacaaatccctgcggtggggccaggagagccagacggcgtcctgcggttcccattcagcgggccagcgtacatcgggttccttgctcatggcggtacggggggtcaactgggctgctcctggaattcgtaaggctcttcaaaggccttgcggaaactcatgaaccccttgaaatcgtccagggaatcctccggctgcttggaaaacacatcctcctcaatcagcaggaaaaccatctctcccacatttttcccgtttctcagcccccattcctttaatacggtggaggccatggggccgaactgggcgagggcgtaatcccggaagccttccagcaattcctgcccgctgacatgccgctgggagccgttttcctgctcttcaatgcgctgcatggtgaaatccagcgcatctttcagaaaggaatacgcccgttccgcaaaacggggatccttccgcacaatgcggctcacggcatcttcaaacgtaggggtggtcataacggctcacccctaccctatacgggcccctgtgaaaatcaagatttttgggagcgcgcaaacttcacggctttccttcctttttcccgcattccggcccttcataagttcccatgaacagcacggcccggtcctccgggctgtaaatgagccacaggaaaggacggttgaattcgatctccggccccctgccgcggggaggagcgccggcaaatggatccatctccccggcagtggaagcggacgcatccagcccttcctcccgcactctgaccgcgcatttctggtacacgccatggattttcaacggctccggcgcgcagctccccatccgtgaaaaatcggcgcggccggtaaacgcgtccttcattcccagcgcctccagggcctttttcagggaaagcgtgggggaagactgggagaaacgcggcagccgcagatggtatctggaatattgctccaggggctttccgccgggcttccgcgtttcctccgcggcatcccgggcggacagggaggacaggatgccgttccattcctctccggtcatcccgtcaatgaattgcttcatcttcctcccctccggaggaagaacggccatgaaaacgggcgcgcccttccctcccgtaaagaacaggcttgccccccgcacgccgtccttttcataatacattcctccctgccggggccatgacctcccctccgtgaatacctgctgcttcatcatgggcacctggcaggcagagccgtcctcccggacaaaggtccgcggcgcggtgtcccgcccttcaaatttactgtcccagaacgccctcaaatacatggcgttcaccagcacaagcaccgtccggtcactcatccgctgcggattcagaagattcctgatgcggtttcccgtattcgttgccgcccaggcgttcacctgccgcacggcttccgccatgttttcccggaagggcgcctgagccacggcatccggccccacggcctttttataggcgtctttcaactccacggaccggtctgcaaaaatgcggttggcggaataacagcgcagcgagcgcgaaaaatcaccagacagaaaagtccagtccctcctgatttttccgtctccgggcaatacggccgccatctgcttctccgtttcccccgccgctcccggaagcatgtaacggagaacttcatacagggaaaaaggggaaatcatgacactgccgccgcttttctccatgcatgcccggaacaggcgcagctccggaggagcggaaacaccgggagacggagcaggcggaatatccgcccatgacacggagcccagaagaaacacatatgccaaagtcctgaatatcatacttctaccttatcagatagatacatcgtggcaagttttacggactgatgccgccaaaaagctccataagcaggaaggaaaccttgccagcctctggtccgtttgttatgaatggaatgctttatgtttcgtccctccatcatgcttctggcaaccatgctgtgcgtttcctgcgtatcgcaccggcctatccaggacagcagttctccgcccattgacgcggccaacccgctggacggcacccccgtggccctggcgtggagctccggaacgcaattgatgatgggggtggacacgggagcggtccagacgtccctgcttttctcccccgcggtggaatccatcggcgcccgcctgcgcggcaggggcgccatgcgcacggccaatgtgcccgtttccctgaaggatgacggagaacccatttcccggaagcaggacgtggtgatggtggaccaggcgccgtatgacggactgctgggctgggagtgcatccggaagtacgtgtggaacatcaactatcccaaacgctcccaccgctttttcaacaaactgccctccaaaatacggagctggcacaagctttccctgatacccggttccgactacccgcagattgcggacaagcacggccggcgcatcattctggatacgggcgcgccccatgccgtctacatctccaagaaacgctggaacgccatcaagcaggcctatccggacgcgttcgtcagcgtttattccggctacagccccgccgcgggcggcttttacgcccatgaatgcatgcacgtgagctccttccagctcggccccctggaattgaagaacatcctgctctgcgaaagcttcgccaatccggaagtgatgggcattcccgacgacatcgacatcatcctgggctacggcgcgctggccgcgcgccagttctggctggacggcccggggaacgccctttatttcagctccaccagccaccggatgcccgcgccctcctccttcaacctgatggggggcaccttcatccaggaccgcaacgggaacggccccatgaaggcttacgtggccgaatggtcgcccgcgtgggacgccggcctcagaacgggggacgtgctcgtttccatcaatgggagaaagaatccgtatccggacctcgtagaatatgtcaccacccagcggggggcacaggcaagcgttgtggtccagcgcaggaacagactggtgcgcattcactgggaagttccggccgcgccccctgccggggattattaccccacgccccaggccattacggagcaggagtttgaaaaccacgtcaagcagcaggaggaaaaggaacagccccaggatgccgcgggagaccagcagcccgcgcccgccgcgacggaaactccagaggaggccgccctcgcgcctgacgggaaaacggacaagacccccgcggcctgagccagcccctatccagccatctctctaccaccggcatgaacgacgcacagcaacaggattcacaggaagccgccggcgactgccgcattccctcacccttccagaaaaagacctgctggtacgccctgacgggcgtcgccatcctggtgatgctgtgcatcgcggccttcgtcatctttgaagtggtgaaactcttgggctttctggaaccggtgctcctgcccatcctgattgccgccgtggtggcctacctgctggaacccatcgtctcctggctggtgcacttcagattctcccgcccctgggccgtggtcacggtcatgttcgcggctctggccgtcctggtgggcttcggcgccactatcctccctcccctgatccggcagacggatgagctgatcgacaaccggatggagctctgggacaagacctccgagctgattgactccaccattgaaattcccttcatctcccgcaccattgacagcgtttacagcaccagcctgcgggaactgaataccggccattatacggacgcggaggtccacgacctgagaaacgcccggaccgcccgggaaaaactgggggcgtacatgaccatcaattcctccttttaccaggacaagctgatgagctggctcacttccggcggaagggccctttacagcaccataggcatcatggtgagcatcctgatcacgcccattttcgccttttattttctgctggaagcggataagatcagggagaaatggcccagcatcctgccgctgaaggcctccaaattcagaaaggacgtggtggacaccatggaggaaatcaacggatacctgatttccttcttccgcggccagatgctggtgagcatcattgaaggcatcctgatcgccatctgcctgaaactgctcggcctgccgtacgccgtcaccatcggcgcggcggtctgcgtgctgggcatcgtgccctacctgggcatcatcaccgccttcattcccgcggtcctgctggcctggtttacgtggggagacttccagcacgtgctgatcgtttccggcatcttcctggccgtcaaccagtttgacggatgggtcatccagccgaaaatcgtgggggattccgtggagcttcatccgctcacggtcatgttctccgtgctgatctggacgcttatcctgggcggcctgatcggcgcgctgctggccgtcccgctgacggccgccatcaaggttctctacaagcgttacatctggcagaatgccagcatgcgccccatgacggagcccctgccgccgccggaggagcctcattaaaagcgccagtcaagaccgcgcggcccttcccccggcagaatcccggcatttttccaaccatcttttgatcaaccgcaacaccacacacctgacaacatgaacaaacccgcattacacctgatgcttgccctggcggcggcagcggcctgcccggccgccaccacgccccaggtcaagccgcccaaagccatcgtcatgatttacgctgacgacctcggctatggagacgtaggctgttatggagccaaggggattcccaccccttccattgacaagcttgccaagcagggcgtccgctttacggacgcctattccaccacctccgtctgcactccctcccgctatgccctgttcaccggggaatatccctggcgcaaggaaggcacgggcattctgccgggggacgccgccctgattattgacaccaagaagcccacgctgcccaagatgctccaatcccacggctataaaacctacatggtgggcaagtggcacctgggcctgggggaaaagggaaagaagattgactggaacaagcacatcgcccccagccctaacgaaatcggctttgatgaaagcttcatcttcgccgccacgggcgaccgcgttccctgcgtgattctggaaaacggcaacgtccgcaacctggacccgaacgaccccattgaagtgtcctaccagcacaacttccccggtcttccgaacgggaaggacaacaaggaccagctcaaactcatgtggagccacgggcacaaccaagccatcatcaacggcatcggccgcatcggcttcatgaagggcggcaagagcgccctgtggaaggatgaggaaaacgcggatgtgatcacgaacaaggccattgaatacatccagaagagcgccaaggccaaggaaccgttcttcctgatgttcgccacgcatgacatccacgtgccgcgctgcccggaaaaacgctttgtgggcaagagccagcatggcgtgcggggggacgttaccgtggaactggacgactgcgtccgccgcatcacggaagccctacaaaaagccggactggaaaaggacaccctggtgatcttctccagcgacaacggccccgtgctggacgacggctacaaggattttgccgtccgggacaacgccacccactccccggcaggccccttccgcgccggcaaatacagcattctggaaggtggctcccgcattccgttcatcgtcaaatggcccggagtagtcaaacccggagtgacgagcaaggccctgttcaaccaaatggacctggccgcctccctggaacagcttctggaacccggtaaggccaattccttccgcgactctgaaaacgtgatccccgccctcctgggcaaatccgccaagggacgcgactaccacgtcatcaacagcaccggcaaggctctggctatccgccacggcaagtggaagttcattcccgccggcgtagccatccgcgacgggatcaacggactgggagcgaaaatgaccaagtccccggaaggcggcagcctgttcgacctggaaaaggacccgaaggaactcaacaacgtagcagcccagcatccggacatctgcgagcagatgaaagccaagctccaggaaatccgccaaaggccggaaaccaaggccgacagggcggacctccttccgctggacgactaacacccattcagcctgaatcatgagagaatccgccacatgctccctgtgcgggcacgggtatacctacccggccgggctggatgaaaaagccggcatgcactgcacggcgtgcggcgtactgattcacgttaaaacggggcttccctttggggaagccccctcttccccctccgggcagaaaccggaaaacgccgtaaaaacaccggcatccctgccccccgtcaagaaaaagcagccggcttcttccggacgggacgcggatgggcgcgacctcagggaaacaagccgctcccggctcactgccgctggctccggcactgccgtccccgccgtgtcctggttggcatggggcctggccctgattgcactggtcatggctttcatcttcccctcttacgggaacgactccacggacccgctatatatgctccagcgcctgccctccatggtcttcggctgcacggcggccattctgttcattcaggggcttgcggccatgcgtcgctagcagaagccgggcttccgcagttccctgggaaacaatccggaacaggcaccggctcaaagccggccaaacggcccggccgccttcccgcaaatccgggattttaagcttgcctgtcaaattcgcaggttctaagttactccccggtaatttatggaacgggaggcagaggcgcaggacaacaggtggagaaccaggctggacgccgtcctgatgcacaggatatggggttcccttatcttcctgtgcatcgtttacatcattttcttcctgagcttcgccatcggcgaccctctggtcaggctcatccagacaggcacgcagatgttcagcatctgggcctgccgcatgctggaaccgtggccccgcctgcaatccctgctgggggaaggcgtggtgggcggcgtaggcggcgtgctggcctttcttcccaacgtggtgctgctcttcggagccatcaccctgctggaaaacagcggatatatgatgcgggtctcccgcctcatgagccgcatcatgaaaatcatgggcctgaacggcagcagctttgcccccctcctgctgggcttcggctgctcggttcccgccatcctgtccacccggaggattgaagcgcgcaacgaccgcctggtcaccatcgccgtcctgcccatgatgagctgcgcgggtcgcctgccgatttacatgatgttcgtctccgccctgtttccctcccgcctgcaggccaccgtattgttcgggatttacgccagcggcgtccttctggccctgtgctgcgcccggctcctgaaaaacacgctcttcaagaccgcccagagggactctctccaccacatgaagcgcctgcgcctcccctccctgcggaaggtgggcgccctgatgtggtcgcgggccttcatgtacgtccggaaggcgggaaccttcattctgggggcctccatcatcctgtggttcctgaacacctaccccaggccggaggaaggaaccgcgccgaatgcggcagcggccatggaacattcctacgccggacaaataggccactggatggaacccgtcacgcaagtggccggatttgactggaagatcaattccgctcttctgggcgcttttgcggccaaggaaatcttcgtcacccagatgggcattctctatgcggtgcaggacggggactccggcccggcagcccagcagaccctgaacgcccgccttaaagccagctacacccccctccagggcatcagcatcatgatgttctgcctgatcgccctcccctgcatcggcaccgtcaccgtcgccaaacgggaagctggcacctggtggtttgctctggcgcaattcggtggattgaccctgctggggtttctgacagctacgctggtgtaccagacaggactgttcctgtaagagccggatgcggaaaaaacggcggcaggaaatatttccggcaggccggaatggcggggaaatgccatacgcccctggaaagtccgtcccttcccggcaacgctactggcccccctcctgggagcgaaggccatccggccttcggattcgctctggctccacagtcaacggaagagagctttccttcttccgttttttgccaccgctggcaagaagcaagagccacttgttcccagggaggagcccatcgtgtaccgggaacaaggaaacctcgtttccggcagcgaagggaattcccttacatacaaaaaccggagggattgtcctccctccggttccgaatacggccgatgaagccgtttaaatcgtcttgatgacggaagattcgtcgtcctccctgtcatcggaggaagcggccttcctggtgggcacaggcgtcttcctgaccttttccagggccttgtccaccgccgtaattaccttgtcttccccggttttctggctggccagctcattatagattttttccttggcttcataatcagccttggcggcggcatcgttcgggttggccttgaatttgtcctctgccttgaacagggcttcctctgcggcctggaacttgggttccaccacattcctgtggtcttccgccgtctgcttgatgcggcccagcaggcggatcacataggggcggttgctgagcctcttgaaggcggaaaccaggaactggcggcgttcgctcgtcttggcgtccgctatcaagggctcgaacagcttgagcgtggcgttgtcatcccggtcacggtccacggagagcacgcggagaatggaatcatgggcctgggaacgcacgcgttcatgcagggattcatccttccacgccttgaacaggtacggaacggcgtcatccgtgttccagtccccccaggcggtgatgatggcgagcgccttcttggggtcttccttgtagctcttttccatcatgtccagcaccttgggatcgccggtgcgggccagcagcttgtagaggaccttgacgttttcctccggcatgttcttctggtactggagcagcttggaagagagtgccatgcgcttggccgggggggcttcgtcaatcaggtagcgggccgtgcggaaggcggaggaaaccagatcctgggaagcatccttctgctggagaatcttcatgacgtcgtccaggtcgtccagcttcatggcaaagcgcatgtacttgagcaccacggcctgcttgtcctgaattttcttgttcttgctatcactgatggaggcgtacaggtctttcagcatgtcgcgcatggcggggctggaagatttggccagcagcgtcaccatcatggagtatttctccttgctgtacctgccgacgtttttcttcatgtcttccaccacctggcgagcgatgttgtcatccatctgggccatgatggaaaccaggtgggcggcgccgggccagttttcccggtttcccttggctcccctcacattggctaggagcagggcggcgtcctccgcattgggcaccaccttcacgtccggaacacggctgagatttttggaatcaaacaggcggctgcggcccagtttgccgccttccaccaccagtgcattcaggcgcgcgttttccccttccacctggtctttcttgctgttggtatgccaagcataaattcctaccccggcagcggcaagcaccagggcgcataccccgtaaatgacgcccctcagcagggatttggatttatccacggaggcgaccatttcccgggtggtttccgtgccggcaggcggctggatgccgcccgtgcccgcaagaggaacgctggcggtgggagaaacggatgcggcagccacgggctgggaagccgcggcagacgccacggaaggaacgggcgcggtccccacaggggatttcagcaccttcaaccggggcacggcgctttccgccggggcggcggcaggggcttcctccgccggggcaggagccggggaagtctttaaaactttcaatttgggaatggagcctgtggaagccgcggcagacgccggagcagccggttcagacgcctgaacggcagcgggagccacgccggcggcctgcgccagggcagcggcctgcgcgtccgccagggctttctgggcctccgccaccttggcaagggcatcctgaatctgggcatccaccgccggaccgggcaatggttgggaagcggcttccttttcctcctgttccgcagcaagacgggccctttcctcttccgccgccacacgggccgcttccttctccgcggcaatgcgagcggcttccgcggcctcctgctccgccctgattctggcggcttcctcctcggcggctattctggccgcctctttttccgcagcgatgcgggcggcctcctgctcggctgccgccttttccgccgcaatcctgtccgcctccgcctgttctgcggcacggcgcgcggcttcctcctgttcctgggccagcttggcctgcaattcaggagtgaggaaacgcggtttggcaacttccacgccttccgcggcgggggaagcaaactttactttgggcgctgccgcaggggctgccgttaccaggcggcggcgtaatttgggagcctctggagaagacggggtttctggctggtcggtcatgatgataaaatggctggaagattggggcgattttacacgatccctccggctcctgcaatctcaaaatccggactgacgaagggacgcgaaattctccggaactcctgattcaacaaggaattcagggaaaaagacttcatgcggcgcagaaaataaaaaagcgtttaaacatcccgcaagcgcccttgcacggaatgttaaacaattcaaattttaaataataaaaatcatgaataaaataagcatattacctctgaacgtcaacaatatgccccctatatttaaacagtcttttaaattatgtcaaaatacttgctctttttgcttgctaccctacggacctttgattaaacaaatagccactcgtcaatatcatgaactccaacgacagcaccaaaaacaagaggcgctatacgcctgaagaaaaacaatccgttcttgacttcatcgctgaacggaaaactcagaacaaaagaggcgcccagaaggaagccgctgaacgcttcggcatcagcacggtaaccatttcaagctggatgaaggccaccaaggccaagcgcggccgcaagcccggcaccaaaaatacagccgctcccaaagctcagcctctcgctgcggcccagcccgcggacctgcgccgcctggcagcagtcctggaagaaatcgccgaccttgaagcccagacaaccaagctcgacaccctgcgcgccgaagcggaggaactcaaaaacagacttacggccaaacaggcctgattgcgtttagccattcctttttccggtaaccggctttccttaacggaaggccggttattttctttccggagatcgcacttgcccctccggaacaattcctttaatatttgcgcccgtgactcaacccgcccacattgctcccgcgagccagtccgtggaaggcatgtatgccgactactttctggattacgcctcgtacgtcatcctggaacgggccgtacccaagatcaatgacgggttcaagcccgtgcagcgccgcatcctgcacgccatggaccggctggacgacgggcgctatagtaaagtggcgaacatcgtgggggacacgatgaaattccacccgcacggcgaccgctccattgcggacgcgctggtggggctgggacagaaagggctgctcattgacacgcaggggaactggggcaacatcctgaccggggatcccgcggcggcctcccgctacattgaagcgcgcttcacctccttcgcccgtgaggtcgtcttcagccccaaggtcacggaatggcagctttcctatgacggcaggaacaaggagccggtcagccttcccgtcaaattccccctgctcctcgcccagggagcggaaggcattgccgtaggcctttccagcaaaattcttccccacaatttcaacgaactgattgaagcctccatcgcgcacttgcgcggccagcccttccagcttctgccggacttcccgaccggaggcgtgatggacgccaccaactaccgggacggggaacgcggcacagggcgcgtccgcatccgggcgcgcatcctcacggaatcgaagaagcttctccgcatcacggaaattccgttcggggtcaccacggaaatcctgattgataccatcgtctccgccgcggaaaaggggaagatcaaaatagcccgcatcgaggacaatacggcccagcacgtggacatcctggtgcatctcccggccggagtggacccggagcagaccaggaaagccctgttcgccttctccgcctgcgaggtcagcatctccccgaacgcctgcgtcatcgtggaggaaaagccccggttcatgtgcgtgagcgacatcctgcgctacaacacggactccaccagggaaatcctgcgccaggaacaggaaatacgcctcaaggaactgaacgaggcatggcaccaggcaagcctggaaaagattttcattgaaaaccgcatttacctctccattgaagattccgagacgtgggaggaagtcctcggcaccattgaccgggaattgcagccgtttgccgcccagctgcgcgcgcccatcaccagggacgacctggtgcggctgacggaaattaaaatcaagcgcatctccaagtttgacgcgttcaaggcggaccagcacatccggcagcttgaagcggacattgaacagacgcagaagaatctcagccagctcaccaaattcaccatccgctggtttgaagccctgcgcaagaagtacggcgcagcctatcccaggaaaacggaaatctcctccttcggctccgtggaccgcgcccaggtggccgtggccaatgaaacgctgtatattgacgaagaaggcttcgccgggtacggcgtcaagaagggaaaccccgtctgcaaatgctccacgctggacgacgtgctggtcatcgacagcacgggcgtgctcaagatcgtgcggattcaggacaaattcttcgccggtaaaaaccccctttatatttccgtcatcaagaaggatgatgaccccgtgttcaacctgatctaccgggacggaagggacggccccgtgtacgccaagcgcttccgcataggcggtttcaccagggacaaggaatacccgctcacccgcggcgcgaagggaacgcgcatcttccacttctccgtgcatgaaacggaggaaaacagctcccagatcagcgtgaacgtctatctgaaggccgtgctgaagctccgcaacctggtcaggcccttccacttcgcggacctgaggattaaaaaccgcggggtccaaggcaacatcattaccaaacatccggtggagcgcgtctcccgcatcatgcccccggcgaaaaccggagacgaggaaacggaggaagaaacgccctccccttccgctgccacggaacaggcggaaaacacgtccgttccggatacggagacgccgcaggccggaacatctcccggaccggaggaacctcctgccggaccggcactggagcagggctccctgtttgactcctgaagcggttaaaatgaggcgcgccatgcctgccaccccattttcggcttgccaccatgggccatcttctgtagatatgggccacctcattcaccacgccgctttagctcagtggtagagcacccgccttgtaagcggacggtcgtcagttcaaatctgacaagcggctccattataaacccctcaagttcaccgcttgaggggttttttttttcttgccagggagaacccagtcccacgtcaggccgcacgtcaaaacggaaaaggccgttccctccggatttgtcctgaaacgggaatgcgcggcatgccgtttccggttacgcccatcctgaaccggaaacggagccaggagttcatactgcccgcagtatccggaacacgacgggccgcattcataaaaaagccccctggcacagaggccaaggggcgaagtatcctaacgtaaagtcctttgacagtggcaccattcccaacgggacgcaagacttaatcatcctttttgcgcataataaattccgggtgcaccgaagcagtcgcggaaaccccctgtgccatgcttcggagaggagcgccactttcctgaatggctcccagagtccggggaatatccggaaacgattccacggcgtctttaatgccgccaatctccggaaatggaaggaatcactatccctcaccgggttttgtgaatttcaggcgttatgctttttgttttcaatggttcatgaatagcctaggaataaagggcccagcgccgccggggaaagaacggcacccccatacagggacgcatcaaaccgctccggagacgcctcatttatccccggcagccgtgcatgcagctcaagcggcggaccgttcattgatggaaaacggcaggtcaaaaagccatttccccccttgaagacgcattcattgcaggtccgccgaacctccaccattattggaacctatgaatactacagaaaaaaagatggctgcggccattctccgctttgaagacgatcgcgtcaccgggccggcctccctgcgcgtttcccgccttcctgccgctgacaagggcggcaagtgggaaatctgcggcatctgcgacggctttgaacccgccgtattcaaccgcctcaaagccttgcttgacgccggaaaacaggaagaagcctgggaaggctgtcttcaatatattctggacaataccgccgccgtccgttcctggattggttctgacgcccatccgggcattgagttcttcctgcgggaccattatttcaattccggcagcaagaacaccgggaagatattgcagcgagccttgaacgaccacggcgccggaattgccgtggacggcattcccggaaaacaaacccggcaaacgctgcaaaccgttcttgcagaatccggagaacgcaaactccttgacagcctttacgagcgacgcgagtcgttttattgttcatgcaggcagttcagcaccttcggtaatggctggcggaaccgttgtaaaaatgcctacgagttcgccgccgccctggcctagcaggactttcaccagaaatgccgcgaaccgggaaacggccggcgcctttgaatgcctagaatgctttcatcagggcgtcctccagcatgcaacaaaagcatccatgcggttttccgcatggatgcttccgtttcttcaacagggtcaggagagcggtccggcaaccgcagacgccgccagcaggcggcagaaccgggaagaagacaacttcatcagccgcccgtccccgcgcttgccatgctgggtcagaatccatggcagggaaagaatttcccgttcataagtcaacagttcccgcacctctcccgccagaaaatggagatgccaggcgtcgcaccgttccggttcaaaccggcagcggacatcgataatcctgccgaaaggagcggaggaatccacccggcgcgccatcaggacaagctccggggtacggacatagacatcctggcagcgcccatcctcatccatctcttcttccctcctgcccgcagccagataataggcggcggcggctgataaagcgttcatgccatccccctttcgccacaggccattcacttccgcaattcccgccgggacagctcatgcagaaccgcttgtcccggcaggttgcggaccggacggcacggaatcatttgcctttccggattctctggatcacaggctgtacctccgtctccggctgggcctgggaataggacaggcgccccggttccagcaccaggcaggcgccatccctgcatatctccgtccgctccgcagtcacgtctatggtatgcccgcagccggaaaggagggaggacgccgcataggccgctcccgccaggaccacccacaggaggcgttcccaccacgtcaatccgggccggtacttgcttttctcataggcgtttttcatgccctgctttcccgcttccagagcggctttcttttgttcttccgtcagattgagcttcatcggcgggcgggggcaaggggttcaaggaattcaggtgcgcgctgcgccgcagcggttccgcagggaaagcccgcgccatggcaggattgttcattgctgttcatctcgttcatttgttggttcatggccttgaaacgccccctgccctgcacgggacaggatatccgcagcctgccggaaaccagcgcggcggcagcgggccgttcaaggcaccgccatctttgacctgcccgcggggtggggcgcaacacgcctgacacgtccgggaacatggaggatgaaaccggccgcacaagcgggaatttccgctgcggataacaaataccctgttgaaaacggaaccggttcatgctagtttcttccctgctatggcaaaaccggctctggggaaaggctttgacgcccttatcaatcaaaatctgtctcgtgaatccttggcggctccccaggcgggagacgttgtgcatcaattatcccatgcctccattattcccagctccctccagccgcgcgccatctttaccccggaacaactggcggagctggtggactccatcaaggagcacggcatcatccagccgctgatcgtccggaaaacggaaagcggcaagtatgagctcattgccggggaaaggcgctggcgcgcttccggcatcctgggcctgtccaccgtgcccgccatcatccggaaggcttccgacaaggacgtgctggagctggcgctgattgaaaacctccagcgtgaaaacctcagcccgctggaagaggcctccggctacatgcgcctgaaaacggaattccgcatgaagcagggggacatcgccaagcgggtaggcaaatcccgcgccgccgtagccaacagcatgcggcttctggatcttccccaggcggtccaggacatgctgggcaacgccttcatcagcgtgggacatgccaaggtgctcctgtccctcaagaaccaggaccagcaaatccagctcgggcgcgacatcgtcaacaagggctacaccgtgcgccagacggagaaagccatccagaagcttctcaatcctccggaaccggcggctcccgccagaaagccctcctccccgcagtacaagaagatttccagcgtgctcgccaaacaattcggcacgccggtaaatatttccggacagggaagccggggctccattgagatcaccttttccagcaaggccgaattcgtccgcattcttgaacttctgggccaggatgaatggtccgcttccaagtaaaccttccactccgtctttttcccatgacgccccgcatcggactcatcctgctcacggccctgctgatgcagtgcggaaatcccgtggaaacgccccttccgggtgcggaaaccattcccgcccggctccaggaaacaacccacttcaacggaggaaacgccatgttccacgccgcccggatgacggagatgggggaccggggttccggcactccaggctaccgccagcaactggactacctgaagaaggaactggccaaacacggctggacctgccaggagcaatcctttgaacaggaaacgtccaagggccccatccagttcgtcaacctgcgggcccggtttggcaaggcgccggatttccaggctccggtccggggactgctgacctgccatatcgacaccaagcagggcattgccggcttcaccggggccaatgacggggcttccggcgcagcggccattctggaaacggcccgcatcctggccggggaacccgcgcgcgccggggaattggagctggtgttttttgacggagaagagagctttgcggaacacatggacagtgacgacggcctgtacggctccaagcactatgccgccgccatgcggaagccgctgcccaagtggatgatcaacctggacatggtggggcggcagggaaaaaagatacgcatcccggtcatgacgccccagtccatgtaccgggtttattcccgcgccattcgtgaactgggctattcaccggaggaatggggggtctccggctacgccattctggacgaccacgtccccttcatggacctcggcatggatacgctgaacatcatcgacgattttcaggacggcaactggtggcacacgtccaaggacaacataggcattctgggtgagaaatccttcaagcaaaccggagaaatgaccctgcatatcctccgccagctgctgcccgacccgccctctacctgacaaccaggcctgaatccccaactacccctatcctcccatgtccttcacctctccctggctgctatgggccctctttgcagcctccattcccatcatcattcacctggtcaacaggtggcggcaccgctccgtccattgggcggccatggaattcctgctccgcgccgccagggaaacccgcgggacgaaaaaactgctgcactacctgattctggcgttgcgcgtcctggccgtggcggcgctggtgacggcctttgcgcggcccctgctcagcagcttcttcggctgggggagttccggactgaatgaagtcctgctggttctggaccgttccgcctccatggacgcacggccggacaaaaccaactccctgcgggacgccatcccgccgctggtggaatccacctttgcgcagcttggccactgccgcctgtccctgcttgattccgccaccggaaccgtcacccagattcccgccccggaagccctggcggacctgaccgtcagcaaaaccacggacggcggcgcagacattccggccctgctgcaaaaagccatcccgtatctggaggagtccggttccggaaagacggaaatctggattgcctcagacatgcaggcctcctcctggaggccggattcccccctctggcccggcgtgcgccagcggctggccgctctggccattcccccctccatccgcatcatggccctccgcgacaggccggaaagcaaccgcggcatcagggtcaggcaggcccaggtgagcaacggcaggctggtgctggacctggaggtgctgcgccagggtttcaaccccaaccagccggaggacgtgccggtacacctttccgtggataatgccgccgcctccgccacgctgcaactggccggggaaagcaccgccatcaggaaggaaattccgctgccgcaggggaaggaatccggcttcggcttcgtttccctgcctcatgacgacttcaccagggatgacatttccttcttcaccttcgccccccgacccctcgccaacatcctgatctgcggcccttccggagaagtggggaaaaccctctccctgatgtccgcccctcccggtctgcccaacaggaaggccacgatgcccggcaacacgcgggcggcgcaggccgctctggcctcccagtccatggtcgcctggtacggaccgccgccgcgcgcggaaatggaagaaaagctactggcctttattgaagaagggggaatcgtcctcttcctgccggacgatacggcccacggcacgcggcatccgttcctgggcgtctcctggggagcgatggaaacggccccgcccgaggagtactaccgcctggaaacatgggaccgccagcgcggcttcctccgggacggttccgaccaggcggccattcccgccaaccggctccgcgccgtgcgccggaagcccctgctgggcaaataccgcaccctggcctcctgggatgacggcacctgcgccctggcccaggtcagggccggaacgggttccgccctgttcctggggactctgcccagatattcctggtccaacctggcggacggccacctgctgctccccctgctccagcgcatggcggaccgcggggcggaacgcttctccacttccatctccctccgggtgaatgacccggccctgccgcaatccgccacggacatccccgtgcgcatggacaacgcccagggcagccacccctccggctctccggcggacacggcaggcgtgtaccgcctgggagcgcagacctatgccgtgaaccgcccctggtcggaagacaatccggaccagattacggatgaaaagctccgcctccttctgccggaggcctccatcagctccatgcagagcacggcggaaacgccctccctggtgcaggaggcctggaaactctttctcatcatttccctcgcctgcctgttgctggaagctttcctgtgcctgcccaggcacacggccaaacgcccctcccccaccatccgcccatgagcctgagccttcaacctaccgctttaagcgtcctcctggccgtcctggtcatggcggccggcgtctggatgagccgcaccgcctgcaaacgcaaccgccgtccgctgacgttcaagctggaactcctgcgcctggtgattctgggggccatctgcttcctgctcttccagccggaatgggtcgtcacctcagccccgcaggagaagcccaaggtctccatcctggaggaccgctccggctccatggaaacgcaggacgtggaaatcaccccccagcacgtcgttacccgcacggcctacgcgcaggagctgatcaagggcaacagcacggaatccctgaaagacacgcacgtggtggaatccgccgccttcggctccccccctccgccggattccccggattacgccatggcctgcacggacctggccaagccgctggaggacgccatgcaatcctcggacaacctgcgggcggtcatcatgttcacggacggcggccacaacgcctcctcctccgtgctgacgcaggcccagcgcatgcgcaccaggggcattcccctcttcatcattcccgccggcagtccgtaccccctgcccgacctggccctccaggacgtgaaagcccccacctacggcatcatcggggagacggtgcagatccccttcaccattaaaagcacgctgggcaaggaaacgcgcaccacgctcaccctggcctccagggacaccggaaaaaccgtcacccgcacggtcaccattccggcccagggggaagtgtccgacgccgtcctgtggaagatagaaaaggaaggggcggaaacgctggagctcaagctccccgtccagccccaggaacggatgcacaacaacaacgcctcctccttcagcatcgccggcaggagggaatccatcaaggtgctggtgatcgacacgctgccgcgctgggagtaccgcttcatccggaacgccctgtaccgcgacccgggcgtggacgtgcataccctgctctttcacccggggctggaggaaatgggggaaggccccggctacctggtcaaattcccggacaggatggaagacctggcccagtatgacgtcatcttcatcggagacgtggggctgggccccaaggggctgacggaggaacaggccgccctgctcaagggcatggtgaaaaaccaggccagcggcatcgtcttcctgcccggctaccagggcaagcagatggaactcctaaaatccgagctgggagacctgatgcccgtcacgttcctcaccgccaagccggagggaaccacccagccagccccctcccccctcatcctgacgccggaggggcgcggctccctccttaccatgctggcggatacggagggtgaaaacgaggaagtgtggcgcaacctgccgggcttcaactggtacgccccggtggaacggcccaaggccggaaccaccgtcctggccgtgcatgcggcggacaaaaacgcctacggccgcattcccctcatcgtcacccagtcctacggcaacggaaaagtcctcttcatggggacggactccgcctggcgctggcggcgcggcgtggaggacaaataccactaccgcttctggagccaggtggcccgctggatgagttaccagcgcaatatggccgccggggaaagaatccgcctgattcccaacccggaacgcccccgcctgggggatacgctgaccgtcaacgccatggtctccgacaaactgggggcgcctctccagaacggggaagtcttcctggacatcaccgccccggaaggcaccgccagccgcgtgcagatggacaacatggaccacacctggggttctttcaccgcctccgtcaaaatcaaccgccccggcacctggaagctgaccgcttcatcctccgcggaaccggacaaatccgtcacgctcccggtcatcaccatgggcgagacgctggaaaaaaccggccagcccgtcaataccgccctgatggaggaaatgacctccatcacgcgcggacgcatggtgaaggcggaagaaatacagcagctcatcaaggaaatcaaggagctgcccgtgccgccgcccatggaaacgcgcatcctgctctggtgcagcccgtacacgctcgcggcccttctcttcctgctcaccctgttctggataggcagaaagctcaacggcaccatctgacccggtgcgctccggattttccggaaaccggaggcttttccacccctccttccgtcatttctccgccgcctttttcccgtccgcagcggaaggggcggacggtgaaaacttcagcttcacgcccagttttttccaggctgcggccatttcccgctccacctcttccggagccttcccgtccagcagaacggcgtgcgccccgttgacgtcctccgcatcccaggcttccaggtaacgcctgaggcgttccgccttgccgtccccttccagatggcaccagtacaccgtccataacagatcggcccagtaccgggacgcgtccccctttgaagggaggccatggcctgcggcggaatgaacggaatcccgcgccagcaggtccgccagggcaggcagcggctccctgcccgtgcgcacggcgcggggaagcatggcagccagccttcccggaagcttccggaataccatcgcctccttctccatgggaagaaaagccatgtacgcggaaaaaccgtccaccagccagtgttccaggtccatggactgcgccacccagtgggtgacggcaaagcgcggatccaccgcgtccagcttcagcggctttccctttttatcccgcagcagcagggccgtaaaactggtgggggaaaacttgagcctcccgttccgcaggcccggcgccttgttgaaatcctcttcctgaaaacataccctcaccagatacttgcgggaggggcggcgggccaccgccagattcatgggaacggccgccagggcggacagaatggtttcaaaacgccgcgccagggccatgcgttccgtttccggcaattttccgggggactcaatgacgaaatggtccgtttcatacacgctcagctcatccgtctcctgcacggccttcaccagcagatagccgggcgcggccgccctttccggccacggagcgtcccaattcggctccaggggaacgtaacgtccgccggacgcaccctgcgccggagggttctccgcccccacatccgtatccggaagcgtgccgccggacttcacccattccaggatatacgcctggtcggcgccggaaaaaacgttcttgggaacggctactatccggccgtcctgaagcttcaggtccacctccgcatcacggacggccaccagcacggctacgacggtagcgccccggtcattcgtccagatgcgcgcctgaacgcttccggccaggctcagtcctgtcaatacggacagtatctttacgggcacggtcatagggctccctttgtccgcacaagctaccacattgtcccgcggacgcaatcctttttccgtccacccttgctccgccggaacccgttccgccaaaagaacatggagcggctccgcgtcatggctttcctccggaggggttgacacgtcccagtaaaacccataatcttatggaagaaaggaaaagcaggcatgcacatcagtcccctcagaaaaaacattccgctgaccgtcgtcaccctggcggccctgggcatcatgctcttcctgttcttcatgcacccctccaccccggaggaatccctggaattctacacgccggacggcaacggcgtaggctccttccgggtggaaatcacggacatgccgtccaaccccgcctatacggaagtgaagatcatcccggaggacatggagcccttccagcggttcatgtccaaattccgcaacaagcccgtcacggccaaaatcccctcctacggcagccatgtagtcgttcctggccgggacatgcagtgcgacggagtcctgcgcctggccgggcattgaccggcaagcggaggctgccttacagcttgtctccctttcccacgtccttcgcccacttccgggccaggaaggaacagaccatcagctggagctggtggaaaaccatgatgggaatcaccagcagcccgatgggcgctccggcaaaaatcacgttcatcatcgggatgccggtggccaggctcttcttggagccgcagaaaataatcgcgatgcggtcctcccgggagaaatgcaacttgcgggaaaggaaggccgtcagccacagggccgcggccagcagaatgccgcagaagacaagcacctccaccagggagagccagggcaggttcttccacacgccgttaatcatcgcatggctgaacgccgtgtaaatcaccagccagatcgtgctgtggtccgtccaggaagtaatgttccggtgcgtgaccacccatttgccgatccagcgctgggcaacctgcccggtcacaaagggcaccagaataatatagcagatgttcaggaaggtggaaaaatccacgcctccctcccctccgcgggaccacaccagccccaccagcagaggcgtgaggaacactcccagcagactggaaacggaggcggagcagatggccgcggccacgttcccgcccgccatggaggtgaacgctatgctggactgcaccgtggaaggcagcatgcacacgtacagcatgcccatgcacaaatccggccccagcacgctgttccacagcggcatgctcagaatgcccagcagggggaaaatcacgaaggtgcttgcagccaccaggccctggaggcgccagtgcatcagcccctcccacacggagcggcgggaaagcttggccccgtacaggaaaaagagcaggatgatggccgcatcgctcaagcggctgaacaccgtatcccacacgccggaacagggaatcagaatccccgcgctcacgctgacgatgaggccgacggtaaagcggtccaatttggaaaggaatcccagcatggaggaaggaagaaaggtgaatgccgtttccggctccctacttgaagcgcacggcgtgcttcttgctcaggcgcagaacgctgccgggggccagctccggcacggcggcggggtccgtcaccttggcgtcgttcaactggatggcgccgggcgtgaaatgctccttgcgcaaaacgccgttggacttcttcacctggaaaacgttctcaaaaaggaaggccaccagggccagcgcattcatgccggcaggcagggaggcgatttccacttccggcaaatccgcggcggccaggtccctcttggagaaacgggtttcccagtccgcgcgggcggcgtccgcggcggcggagtcgtgatagcgggccgtaatcttccaggccagcagcttcttggcttccatcgggtgcagacccatgtcccgcttctcgcccagcagcacctggtaatagcggtccatcagctcgtcgctggcgctcatcatcttgccgaacatcatttccggcgcttcgtccacgcccacgtaattcccgtaggacttggacatcttgcgcacgccgtccaggccttccagcaggggcatcgtcatggcgatctggggcagcatgccctcctccttctggaggtcgcgccctaccaggatgttgaaaagctggtccgtgccgcccagttccacgtccgaccggatttctacggaatcccagccctgcatgatcgggtactgcatttcgtgcaggcgcacctccttgccgccctccacgcgggccttgaaatcctcccgggccagcatttgctgcatggtcacgcgggaattgagcttcagcacttcctcatacgtcatcttgcggaaccagtccccgttgtagacgatctccgtcctgtcccggtccagaatcttgaacgcctgcttggtgtacgtctccgcattctccagcacctgttcacgggaaagagggggccgcgtgacggaacggccggagggatccccgatggtggccgtgaaatccccgatgagcaaaatggcctggtggcccagttcctggaactggcgcagtttttcaatagccacggtatggcccaggtgaatatccggcgcggtggggtccacccccagcttcacgcgcaggggacggcccagcttgaggcgctccttcaactcttcacggctgatcacgacggcggtaccgcccatcaatatgtctaattgctcatctatagtcattgatctggcgcatagagtgccgggggcaccgcgccttttcaagcttatatcctgtgcgcgaagcatcaggcccggcaaagggccctccggagcccgtgccggtaccgggaagcgggcggcccggaggtggtatccgtgccacgcagggaacggcatgccaaaactgcgtcccttcacacgcccttcccgccaacgccgctccatggtttacgctgcccttttccgcaagcggcggcgttcctgcggaaccgcaaaaactacatgagctggtacaggcggggataggaagcctgattggcggtcacgtaatgcgggcggggcttgggacccggcctgttctgcccgtgatgccagccgttgttataatcattatggttataatggtgcgacggaccggggcggtaataatcattattattatggcgatggtggcagcctgcggccaggacggctacggctgctgctgcaagaataggtattattttcatattcatctttctaaatggtaagaccaccctgaaagaggaatgcgaacgaaaaaagtctgtcacccgagcaaacgctccctattgacaaagaaaacggcccccagcacgcataaaaaagcccacaggtagtcccacttccatttctccccgatgtagaacagggcgaaggggatgaacacgcacagggtgatcacctcctgcatgatcttgagctgggccacgttaaggcctcccgcattgcccaggcggttggcgggaatcatgaagcagtactcgaaaaacgccacgccccagctcatcaggataatcagcagcaggggcttgtcgtccgccgcggaacccttcttcaaatgcccgtaccacgcccacgtcataaaaacgttggagaccaccagcatggaaatcgttaaagcaaccttcattgtcttttattcaaaagcgtcaatccttggaagacttggggtccagggcgtcacgcagcccgtcccccaggaaattcagcgccagcagggtagcggaaaacagcagcgccgggaacaggagcagttccgggctcacctccatgcggtccgccccctccttgatcagcgtgccccaggaagaattgggagccttcacgcccaggcccaggaaggacaggacagcctccagcagcatgatgccgggaacggccagcgtcgtgtacacgatgacggacccgaacaaattcggcgcaatgtggcggaacagaatcttcatgtgcccgatgcccagggagcgggccgcctccacgaactcctgccccttcagctccagcgtctgcgtgcggacgatgcgcgccagcgtcagccagcccagcgcgccgatggcgatgaagaggggaatcaatccggtcatgggactcaccatctccacggaccagcccgtgacgccggaaacccactgcgtcagctgctgggcgggttcctccacggacagggagaaaataatcaccagcacgatgaacggcagggcgaaaagcacgtccaccaggcgcatcatcagggcgtccagcctgcccccggcataaccggaaaccagcccgtacgtcacgccgatgaccagggaaacgcccgtggccaccacgcccaccagcagggaaatgcggcccccgtacagcacgcgcgccagcaggtcccgcccgagctggtccgtgccgaaccagtactgccaggaaggactttccgcaatgcgggacaggtcctgcacattcgggtgcggcagccacggcagcagcggacccagaaaacaggccgccacaatcagcgccagcgccagcagggaaaacatggccgcgcggttgcgcgaaagccgcagaaaggcgtctctccacagggaggagccctgctcctccatgctgttccattccctgttcttcatgactccgccctcaatctggggttgacggccatctgcaccaggtccacggccaggttggccgcgacgatcaggatgccgtaaaacaggacaagcccctggatcaggaaataatcccggtccgtggtggcgttcacgaaatgctggcccatgccgggaacctggaagcaggtctccactacaaaggagccggtaatcatggcggcaaaggccggccccagataggaaagggccggaatcaggccgccgcgcagggcgtgcttccagaccgtgcggaaggggcccgcccccttggcgcgggccgtcctgatgaaatcctgtcccagcacctcaagcatgcctccgcgcgtcaggcgcgctaggtacgcggcattcaccaatcccagcgtcagcgcaggcagcaccacgcagccgggagaatcccatccggcaacgctcaggccgggcacatgcatgcccagcgccacacccagcagcggagccaccacgaaggcgggaatacagatgccggccatggaaaccagcatcacccaccagtccatccaccggttcttgtacagggccgccacgatcccggcgggaatgcccaccagaatggaaatcaccatgcctatgacgccaagctggagggataccgggaatgactggccgatcatgtccgccacgctgatgccctccttcaccagggacggccccaggtcgccatggaccagcatgttccaccagtagcgcccgtactggaccagggagctctggtccagcccgtagctggtctggagctgctggaggacgtgctccggcagcttcttctcccccatgaaggggtggcccggcagcaggcgtatcaggaaaaacgtcacggtctccagcaccagcaggaccagaagcccctgccccaggcgtttcaaaatcatcctggtcaaggcgcggcctccttcccctgctccctgggcgcgcccaggctgatgtcttcaaacaaatggttgtccagcagcaggggatgccatccccgcacctccggactcttcaaataggaccgcctggcccagtacaggggaatcaccggagactccgaaagcatcagcgcttccgcacgggccagcagggccatgcgcttctcctggtctcccgtggcgcggctctccgccagcaggcgctcatactccgggcgggaccagcccgtgttgttgttcccggaggcggagctccacaaatccagaaaactggacgggtccagataatccccggaccaggaggaggaactgaaatcatactgcatggaattctgcgcgaacttgtaggccgtccattcacaggaacggatatccacgtgaacgcccaggtgcctcttccacatgccctggatggcttccgccatcgtcttctgcacctccctggacgtggtcatcaactccagccgcggaaacccctttccgccggggaaacccgcctgcgccagcagggcgcgcgccttctccggattgaactccaccccgtgcggcgtcttgtagcctgcgccgtccggcgtaaagccgaagcacggctggccgcccccgcacaccacgtcacgcaccagggtctcccggtccacggccagggaaagggcacgcctgacgcgggcgtcatccagcggcgcgcgcgacgtatttagccggtaaaaaatagtcacgtaataatcatcctggcagaaatcaccgccgccgcgctcccgcgcgtacgccgtcatttccgggggaacgttattggtgacatggagcttgccgttgaaaaacatgcgggtttccgtaaagccgttcacggtgggtagaaaacggaccccgttcagccggacggaggaggcgttccggtagcggggattgcgccgcacctccacataatcattgaaacggtgctccgccatcagaaaaggaccattccccacagccttgccgggccgcgtccagccccccgtcctgtccagcatgccgccgtgggcttccaccgcatggcggggaaccggaaaccaggtgcaatgaagcagcagcaggggaagctggggcatcggagaacgcatttccagctccagggtatgatcgtccgcggcgcgcacgcccacacgggcctcctcccacaaatccggtcttccggcccggacatcctccagcatccgggccgcgattctccgcgcgccttcctccggcattccgtccggccactccatccgggaaatatccttccgcagcgcctccagctcccgggcgcccatgccgtccagcctctcccaatccacccgtgccagagcctctccatccagccccgcttccccggccagccgggaaccggggccgcacagcagcaggctgcgcctgttccggttgtaagcctccgcattcttcagcggataaagcatgtccgcataccttccgccaaactccggatgaagcaggcggtggtaggcataaacgaaatcatgggccgtcaccggaacgccgtcgctccacacggcgtccttccgcagggaaaaacaccacttgtccgcctccggattatgcgtccaggactccgccacggctggatgaaaaacggcgtcatccctggaatccccgcgcagcagcccttccatcacggcattgataatcttgaaatcggaaacggaggtggcaatatgcggatcaaaactctgcggttccgcattattgcccacgatcagcactccttcctcctgcgcccgttccacgctggtacgcgtatcgcatccggcgagcagcagcatcacacagaacatcatgaacaggcgcatggcgggattctgtcaggtttccttcccccgcgcaaggcttcacctcaagaaatacaaccgccgctccgcggctcacggaatcttcccggaaatccctccctccgctactgccgggcatcatgccgctccgttcacggccggcccgtacttgtggacattcctttgccggcagggaggtggttcctctcctgaaccaaaccaacaacgggcacgaaacacttcccgagggaaaaaccggccgccgcaggatatcttcacaaaaaccgtctaaaagagacgcttgcgcgccgggaagcctgggcaaatacgccgcctgtcctcccccgcctcagatgcatgacgtgccgccttcccatcccccacaggattctaccggaaggaaatcccggaaaccgcctccactggtcttttctgaaacagtcttttttatcctgttttcccaactgttcctcccttaatttttcccccatgtttaaactcaaaaaccatgccttctgtcttctgaccgcatttggggggatgctcctcactccggcctggggagagcccgtagctccgtggctcagagcctacattaacggggaggaagtggtcggaaccacgctggagagccgctacagcactcctgaggacgaacccgccagccctgtcatccaatgggaaaaagcggattcccggaccggaaagcccgtgctggtgcagcagggcaaggacgcggaatcctacaccctgacggacaaggacgccggaaaatatttccggatcatcgtgggcggcggcacgaaggatgcgattgccagcccgtggataggcccggtcattacggaaaagcaggcggaaagcatcaacaatcgttttgaccccggcaaaagctatcaggaaaacgtggacgcactccagaaggagctgtctgaaaagctcaaggacgccgtttatttcaccgtggacacggacaaactccacggtgccccctacgcgatggcggccaacgaacggatagccctgccggaagacatcaggcccttccgggaaaacgggaaaatctatgtaaaccacccctttgtgcaggccgttttcaagaaggagctgccggacgaaatcatggaggaagcgggcggccagaaggcctacgaaatagggaacgtggccagggcgctgaaactcaacctctggctgggagacaaggaaaaggctcccctcccgaacttccgcatgcagcccatggcggaaggactggtggttctttcccctgaaaaaaacgtcttttccccggtcgcggaccgcgacctgatcaatgaagccgtcaacaggctcttcgacttcaaggccagtgacgaacagttaaaatggttccgggacgccaaattcggcctctttgtccactggaacccctcttccctgctggaacgggaaatcagctgggaacgcaatgcgacgcgccccaaggacagcgcaagcggccataaaaacatcatggactttgaatatgactccgcccaccgccgcttcaatcccaaacaatacgatccccggaagtggatgtccgtcgccaaaaaaagcggcatgaaatatgccgtgctgaccaccaagcaccacgacagcttctccaacttcccctccgactacgacaccttcaccatcgccaataccccctacggcaaggatatcgtggggcaattcgcggcggcggtccatgcggcagggctcaggctgggcttctactattccgggcgggactggtacaacccctactacctgaccgaccagcactaccgctacctggaatactacttcggccagatcagtgaactgctcacccgctacgggcaggtggacgtgctgtggttcgacagcctgggcaacagctccctcaaccagtgggatccccgcaccatgatgcgccgcatcaagcagtaccagccggacattctggtcaacaaccgcatgaacggcacccgcggaggcaacaaaggtccgctgcccgacgacctgaaaggagattttctgacgccggaatgcaagctggggccgttcaacgacaaaacgccctgggaaagctgcatgaccgtggcggacatccccggcacccgctggacgggcaactggtcctacacctccaaggcgaaggccaagcccgtggaaacctccatcaaattcctgatcaacaacaccgtcaaggacggcaacctgctttacaacatcggacccacgccgctgggcacgttcgacccgaaacaggctgaaaccttcctggccatgggcaagtggatcgccccctaccgggaagccatttacaacacccgcggaggtccctacaaggaccagccctggggcggcagctgctacaagacggaccggcgcggcaaaaaaaccgtctacctgcatgtcagcccgctgattgctcaacaaggaaaagagctgaaaggctccgaacctctcttcatcaaggacatcggcgagaaattcacaaaagcgaccgtcatcgtgaacggcagtggaaacggaaaagccgccaagcttgaaaaggaaggagcccaatacaaaatcacgctgcccgcaggcgtggcctgggacagcctggacaccgtcatcaagcttcaataacgccctttttctcccacggagagagcatacagccagccggcccggcatcatgccggggccggtttttttattccgcaaaacaggcatgcatgctccacaggattcctttctcttccataaccgggcttggcggaaagagcggcgcggcgcgatgctcccttctccgcagccgcgtgtaaaagaggaacagacgccttcaaggcaggctgcacccggcgggaactgacgggcaccctctcaacggaagccgcttaagcgagcagctcatggcgaaaaaaagaaaagccccgcagcggcatgaaccgctgcggggccgttttccaaaatcagggaatcaaggaaagggagcttttacttacttgctctgggccttcttggctgcttcaatctgagctttgatctggtccttgttggcaagaatgccggccttgatgcggggagcacgctgcccggcttccgtacccggcatcaattcggccaccttgtccagaatcagcacggctccgtctacgtcaccagtggaattcaggtaggtcccgaactccatcatcagcaaatcctgctgggtttccggcagaagcttgtcacggtcgggataagccttgaccacctggagggcttccgcaggcgtggtcttgtccgtcagcttgccggcaagataatcctggacgtccttctgttccttcttaagctggtcggcgtgcgcgtcagcggctttcaagccggacttgtcatccttgtccagcttcttgatttccgccttcacgtcgccgtaaaaattgtccacatactcctggggcgccagcttgagcacttccatcagggcggcaaccttcgcttcatccgtggtggccttggctacatttgcctcagcggcgttcagggcttccttgttcttcaaggcgtcctgcatggccttcatcacgtcatccttggaacggccgcccacaaatcccccgaagggcttgccggaagcgtccgcaaacacgatcgtcgggaacccctgcacgccgtactgctgggcaagcttgtcattggcggctttcatttccttggactgttccttgccgcgcggataatccagctccacgagcacgaaattcttctgggcgtccttctggaaatcaggcttgctgaacacgttggcgcggagctgcatgcagggcgggcaccagtcggaaccggtgaactcgatcatgaggtccttcttctgttcggcggcctgcttcttggcggcatccatatcggtaatccatccttccgcggcaaaacagggagcgacgcaggcggcaacaactattggcagaatttgtctaatcatatctacagttcaatattgaagagtccgacatccagcgtcaatctcttgttcaatcatttttggaaaatttccaaaaggccgcgccttccgcaaggaaaacgccgtccggcagccgacgggaacagccatttggaccgtgggaaggcagtgtcattattgcaccaaatccggggttgcctttcaaactgttttcacttatgtactgggcatatcatgaacacggttttaatcattggagcaggcggcgtcggacatgtggtagccaacaaatgcgcccaactgccggacatctttcaaaacattcatctggcctcccgcacgaaaagcaaatgtgacgccattgcggacgatgtacgcgccagaacgggcgtcaatatcaccacccacgccgtgaacgcggacgacgtgcccgccaccgtggccctcatccgggaagtcaagccgcagctgctgatcaacgtggcccttccctaccaggatttgaacctgatggacgcctgcctggaaaccggcgttaactacctggacaccgccaactatgaaccccgggacgtagccaaattcgaatactcctggcaatgggcgtaccaggacaaattccgcaaggccggactctttgccctgctgggctccggctttgaccccggcgtcaccaacgtcttcacggcatgggcgctcaagcaccactttgacgaaatccatacgctggacatcattgacgtcaacggcggcaatcacggcaaggccttcgccaccaacttcaacccggaaatcaacatccgggaagtgactgccccctgccgccactgggaagacggcgccttccgagaaaccgcccccatgagcatgcaccggagcttcacctgcccgcaggaagtgggcacctatgaaatctaccgcatgtaccatgaagaaatggaaagcctggtcaagcacatccccaccatccgccgggcccaattctggatgtccttctccccgaactacctcaagcacctggaagtgctccagaacgtgggcatgacccggattgacccggtcatgtacaatggagtggaaatcattccgcttcaattcctcaaggctgtgctgccggacccgggggacctgggcaagaccacgaaaggaaaaacctgcatcggcaacgtcatcaccggaaccaaggacggccaattcaaggccgtgtacatctacaacatctgcgaccatgaaaaatgctttgaagaagttggatcccaggccatctcctacaccacgggggttccggccatgatcggcgcggaaatgatccttacgggcaaatggtccggcgctggcgtcttcaacatggagcagaacgatccggaccccttcatggacgaactcaacaagcgcggccttccctggcactgcgtggaactcacggatgaacaggccaaagccctgcaagtccattgacagcaacctccggccgaagccgtccgctccatcaaaagccgggcattgacttctcaaatgcctggcttttactctctcaaatcttcacgatgcccataatcattggcagttcccggcgcgatgccttagcaggaacgaatccatgaaagcatatcttatcctgttgctggcgattgttctggaaacaatcgccacctctttcctgaagcagagcgaacaatttaccaggctcctgcccaccatcataaccgtagccggatatgcaggctccttctactgcctcagcctggtgctgaaaaacatccctgtgggcattgcgtatgccatctggtcgggaatgggcattgtgctgatctccgccatcgggtgggtggcattcaagcagcacctggacttggcagcgatttcaggtctggcgctcatcattgccggagtattggtaatcaatatcttttccaactccgtttcccactgatgggaaaaaacggaaaagcattccctgcaaggggatgacggccctcccctccgggcagcggcaaccggaatagaaaaacgcctcttcactgaaaagagggtaaaaccttccggaggcccggcaagccggtcttcacaatggctcattcctccgccaataaaatccgtcaaaggacctgtttctccggtgaaaaagagtatccctctcatggttctaactgctgtggagcttttccggccagccccgaactgccacctttaaaaggaaaaagagaagcacccgtccggccttcttccggcgcatgcataattttctggcctggaaagcaggcgggcggtaaaaacggggtgccatgaaatatcttgcgctatttctcatctttctgtttcaagcggtgcacgcggaggaacccgctccgtggagaatcgccatcatcggcgacacgcatgactcccccaaacgcatggaaggaagcgaaggggtagccgtcaatttcatcaaaaccctctatggggaaatcctgaagcaccaggtggacatggtcgtccaggtgggggacatggcggacattgaaggaagcgcccccgtcaacggactcgccaagcgcaaggaactcaacaagatgctggaggaaaaaggcatccccttctacgccgtgcgcggcaaccatgaatcgctgcccttccgcgcggaacaattcagggaactcttcctgcctacccggaaacagggcgccaaagggctggccaccagaaaactgaactacggcatccgccataaaaacgcctccctgtacttcatggacattgacctgaccccggaccagctcgtagacttcagcgcgtgggtcaaacgcaacaggagcaaggccaacaccgttccgcgccattgcctaattttcacccaccgcaccctgcaaactcccatgcaattccgggaatgcctgtggggccgctacaacgacagcgcggcggaacagcagaacatcttttaccgcaacctccgggacgccggcgtgcggttcgtcatcaccgggcacctgcatgcccacgacctgtacatgattacatccccggacgggaaaaacaccctcacctccctcatctgcgcccccgcgggcaacaaggtgctgcccatccccttccttctgcccgcaaaatcccgcgtaaaaaccctgcaataccgctccggcatcacggcctactacatcctgaacatctacccggactccatgactctggacacctatgccgcccccaacaacggcatcacggaccaaggcccgcaaggcagcgaattcaaaaaactgcactcttacgcgattccgatgaattgaaaaacttcctacccatatttttctttccatcccggaacaaactggagtccgccacgctttccgggcaagcctgaagactctcctgtccacgcaaagaaatagaagccttcctcttttccggatagttcatgttcctgcgtattattccaaacgcccggaaccgtgaggctccaactttctatcgtgctggtgtccgcggcctcccttatataaaaattccgttccgccctcacgcccggcagcacggtcatcaatcaggcctccgatttcctaatcagcgtatccggcctttttaaaatacttgacctcttctccggcctggcccggataaaagtgaaccagcatctccacaaacgcagcctccaacctcttttccaattcgtacttgcaactgtcgtttcttttttaattgctcatcaacttattattgcagtagagagcccaaggctcctgttcccggttcaattccggatcataccgctcccggaatgtttctaacacagtcgctccatatcccggtcaaatcacttcttttcacacggcatcgagtgacaattccagatatatccaaggctaaaccgttcatccgcctcaccactctggtcttcaattcataatccatgctgccacacagcagccaaatttggtaatcgtcacgatatcgtaccactgtggtcctcaaatttcccgcctgtaaaattccgcaaaacaaaaatggcatcgcgctttcacgatctcgtggccatcaaggctttccgagtcctctccctcctcccatcatggatgcacaccaggaacacacccagtcccacgcttggggaaatgggaatgttccaagtcgacggcaaaaatccccccccgtgacattatcctacaattgattcgttgcaaatacttctatgacttcattcgcaccattcttggaataacctgagtcgaaatccgtaccggaaggctcctcccttttgtccctctcaataattttgacatagcggaagctcctataacggtggtcgcaccttccggaaacctctttgtcaccgttcctccatccttatattctgccctgatctcttaggaaaccactatgatctttgcctattcactactcattagcaaaactcatagttttcttttcaaaaataactataatttatttcttctttccagtctgttgccggagcgcctgttcatatctgcgtcctcgatcacccttgtataggaatttagtgcttgcatccctccctacagttcgattgatcaattcgtccatcgcctttccttcatatcctgccagtttaagatatttttccacctcatttttatcgcccggaaaacatttcaataaaattttcattaatgccggctcaagtgaatttttgagataatgggcagctgaataatttctaacttcattggaagctattttattataataatatatacgctttttttcaatatcaccagaaccccaaactccatctcccctatgcttctctgcatactcctttaaccgtttctgtactattttttcgtattctccagccatctttgcatgtttctcaggcagcttctcattataatcatcacgcacagttttagtcattgcagcaacatacaaagataataattctaccagttcttttcttttcaggtcatgctgagaaacaatttccggcaggttccagcacattcttaccccttcagtagctaaattgtctctttctctgtaatccaaaccttcatggttgatagaatctgtactttcatcataatctacctgaaaagcaggagctttggcgacataataacatatccataaaaatttattgagatccccttctttcaattcctcccaattcatttcctcaataaattcctgagacttatggaccttctgataaaattccttcaattttccatctctcagcaactgcgcccatccctggaccaattccggttcctccttgaaaatagggataacatccggagctttaattattatcgtttgcgctgcattaacattcatgacagacgcgaggataaaaacacctatgattcttaaataatttttcattctgttattttttctcttcaggaccgaaaaaatatctcaaattcaatgtattccttgtgacaaaacagccaaatttgtttatagaagaatttaaataagaatgaccattggcaagagccaatttttcaaatacaaaatattgattttcttctacgattactgcaccgtccttatttttactgtccaatcctcctcctccataatgaactctccattgacatgcccaatgccacttttgaggcaacttatgcagaggaggaactccattaatctctattacaaaacggacatccacacttgatgtagctctatcccaaaatttattgccgggcaaaacatctattctcgcatcacagcctgttgcaggcgtatgccttggatctatgctttcacttatacttccttgatccttgaaagagcccaagtccctttcaatcacatctatttcaacaaagctcaccttcaatggctgcactcttaattctaataacatggaagctcccatcgtcaactcatcctgaaaagaggcaggaactcctccttgggcatgcttgctccacattttttcaggaaagagaacctctatctccaacttttttgtccttttcccatttaattctgcctgaaccacaaccttaccgtctttctttttccctttttcatctaatgaatctttcagaaattctttttttgcttctacattcaaggttgaccttccatcagtattttttggccattctttcaaatactcttggccacttagaaggtgccacttaatattttttacgttctgggcattttgcccctcgacaagcttgcctgataatatcaacttgaatctttctccaattccgacctcttttctttcataagccttttcttcatcccggtgaatattcaggacgaattccgcagaaggctgttctgtttttgttataatcttcaacaaagaatcattccagcattcctcctcatcttctgcatgaagaggaacattgatacagagcacgcacagcagaaatatcatcccatattcccacaatttttgaattgctgatgaaccaagaaaatatttcatattctttattattatttaattttctaatttttcaataaaaattttcctaactccataatacacagccgcgccccggttgacgtagtcttccgggttttgcgacaggtccacccagaagatgaaggagcaccacggggagggtggaacgaggggaggaaccacaatttcccgaaagccggcctttttctgttccagaatcaggcggacgcgcttttcatgctgctggaacagaagcaggtgatcgtgaagggtggaaagaacgcatattccggacagcgccagaaaaacagccacagtcatccgcggacggggctccgcggcgggaatgccgtaccacacacggagaagagccaaaacgccaatgccgaacagcagggtggcggagaacatggcatggtccgccggaacgacggcggcggcaaaggaaagagccatggcatacgccgtcagaatgtatgctgccgctgttccgatgaaaattttccatggccgtaaggcattccggttcctgcggaagcttctccacagcatccaggcagccaccgcacccagcagcaggggaagggccaggtattcatgcatccggagcaggagcgcggggaccgcttcccatctgtcccaaacgccggagaggggttccgcgcagccgggagtggcggagtgcatccgcgcagagaggccgggcgcaagcaacatgcacagagaacccgctacctgcgccgcaacgcccgcataaaaccacaagggaagtttttccttccggaccaggcggacgaagacaaacaaggctcccagcagaagccaggttcccggaatgttgttttcattagtcatgcctgccaacaatcccagtgccactacgccagcccactggccgaaaccctttttagcaggctttcctttttccccgttttcccgattttccagcaattcccggtacaggcacaggaaaccgagccagagggcggctccccaggaatagttggtagcgccggagagccagtaaatcgtgacgccgggccgggccgtacaggtgaagagcaggagaagcgccaatccgaagagccgcacgtccggccaggaacgggggtccaccctgcgcccggaggccagatagaacatcatcagcgcgaggcagacctgtacaaaggggttgagcagaatgaagagccatttgcccgctgtcgccacagcaaaggccaggtattccccgattctggggttccagctcatgtaggaggccacgcagcgttcccagaccaggctgagggagaaacggtgttccatgcccgtcaaggcgtgatggtacgtgtctgaggtgaaggggctccaccagctaagcaacgccacatacagcagggcggctgcaaccagcgcccaaaaccataccatggacgtacggggagacggcatcagctcgggtccggtttcttcttccgcagcgccgggggcaggtccaggtcttccccgtccagaatgagggggcgtacatgggcaaagagtccgtgtcccgcgcgctcttcctctccttcttccgggggagttccttcttccagttccttgatgtcgggaaccgggtccaattcctgttccgcatccgctccgagttcctgcgctgcaggcgcgggttccgggaacgtttcctccacgtccggcacggagggaacaggccttacaggcaccagttcctcttccagttcatggtcatcccttctgacggagggaatggaaacgggaggttccggctccggacgccgttccggttcggaaaccacggcgggagccacaggctgaatgatggttttcccatccccgatgaagggttcttcctccggcacaagaactgtctggagctccggttccctacggaaaacgggagcaggagaaatttccggttcattcacgggcacaacgcccagcacggtcagggacaggcggtcttccggctgttccgccacggaagcgccgatatggaggcgcacgccgctccccaggatttccgccactccgccagccagcgcttccaggcgtttcagggtcagggaattgccgccgcgcaccagcaccagaacgtcgtccacttcccccagccgtttttccaggaaaaggggagagtgccggacctggtccagcatgtccgccgtggaaacgtccgcggacgcttcccctacgccgaaggagcaaattcccttccctgttccggccacgcggagcaggtcatccagccccacgcggagcaggcttccggaagagttgagaagggagggcacgatgagcacggcgcgggcaatgagagcattgaccacggaaaaggcttccaacactcccttgtcgggatcaatcaggctttccatggcgtcattgtcaaaccgcagcaccatgtcggaatacagggccagccgtgacagcgcctcgtccgcctgggcggcgcggcggtccccttcaaaccggaaggggcggatgacgacgctgacgacgtaggagccctgctccttggccagccgcgccacctccggcgccacgccggagcctgttccgcctcccagcccggcggcgaggacggtcagcgcactgccttccagggcccggaggatggaggattcactttcacaggcggcctgtgcccccacggaggcatcccctccggagccgagcccccgggtaagcctggcccccagatggaccttgcacggaacggcggaggcgttcagcaaacgggcatccagattcatggcgcacacggaagccgcctgcggagccagcagcagaacctcctccatcaccttggcgcctgcggctccaatgccgcacaggcagatttttccggatagcccggacgggtcctggggagaaaattccagcatggtttttaattggggtagagattgatcaggagttcttcctgccgaagaggcccagcacgcgccccagccagctccgctgctgcggcagttcggcatccagaatctgggcataccgtatcagcccgatggccgtacagtaacgcgggtcatccagataggaaggcgctccgtttttgaccagcgtgggacggctgatcgccacgccgaacacgtgggaggccagttcccccacgccgcgcatcaggctggcgcccccgcacaggtagacgccgtggcagcggttgcccttgaaggtgtccttgggcagggaggatttgaccagattgaagatttccagcaggcgggaacggatgatttcattcagaacattgcgttcgatggcggcatccttcatattcccttctccgcgcacgcgcaccatttcattggtctttccggaaaagctgttggcgtccccctccgtctttttgagcagttccgcctgcgccagcggtatgccggtcatcagcgtgatgtcattggaaatatggtcgccgcccaggggcacgcagccggaggccaccagctggccgtccaggtaaaggacgtagtccgtggtgcccgcccccatgtcaatgaggagggcgcccgcctgcttgacctgcctgttgagcacgaactgggccgtggcgatgggggcgaagaccacatccgcaatgtccaggggcacttcccgcacgcagcggaaggagttggtgatgcgggatttgatgccgtggatgatgtggcagtctatgtccagcgtcctgccggtcagcccggcggggttggtcaggttttcctgcccgtccacggagaagaggcctggcacgcggtgcaggacgaattgttccggccccagcgcaatgtcacgggcgatttccgtcacctcatccatgtgttcctgggagatgatgctttcatccggaggcaggcggaaagtgccgcggttgttctgccccacgatgtgggccccggtcacggacaggtagacggtcatgatgtccacgtccgcatggtcctgggccatgttccaggcatcataaatgcactggataaccttggaggtgtcttcaatctcgccgcggaccacgccctcgctaggaacttcacccacgccgatgatcgtcacggtcgcgtcaggctttacttcgcccacgaccatgcaagtcttgcttgtccctatctcaagccctacgtgaatttttgtcttagccatgaaagtcaaggaactatcaacgtcctagcacctgatagcacattactttccattgttcaagaaagcctgcgcgaacatacgcaaaaaacgcggttttccgttgcgcaggcccggatcagagacccgtggggtggcgcaccaggaagttccgggcattgcggccgtccaccctccagcgggggccttcgccgcggcggccgcttccggtggtgtcaaaccggaggccgcagatgaccatgaatacgtgcccgttcttggcatagacggaaatccagtccccggcgcctttctgcccgtagttcaggaacagcttggaatggcgggtggaggtgagcagcccggcttccttcagcacaaaggaggtgctgccggagcagtcatagtgggagtcatagtgcttcctgtggccgccgcctaggcggtagggcttgttgaccagagaattggcggccgcaatggcgcgctttacctgcgggggggcattcctggggggaatggccttcccgttgtgcagcacggccgtttttcccggtacaaagtggtaggcggggagccgtgccggagcttcgacttgttgggaggtggaggagcaggaggagaggagaaggccggccagaagggcaccggccacggagagagttttgtggaccgcaaatgtcataagaattataaactgcggaattcctgcccccttggcaagaaaataaatttcccccgtccacattacatggtagacgggggaaagaaatcaacaacatttagccgttggaacgggcgagagcgtccttctccacggcagcccacagggagtccagggaggcctggaccgccggcagggcttccttcaccggagcgcccggtttcccgtggccgaagaggtagtacttgatcttgggttccgttccggaggggcgcaccgcaaagctgcggccgtccgccatatccacaaagatcattttttccgccggaatggggtcgccctccgcatccaccatgtcacccttggaaaagtcccggatgccgctgacggccacgccgtccagttccgtaggaggattggcggaataggaggtggagagggcggcgatttttgccgcgccgtctgcgccttccatgaccagggatttgcccatttccaggtacacgccgaattgttcaaagagttcatgaagcagttccagcaggctcttgccgacactttccgcataggcggccagctccgcaaagatgatggcggcggagttggcgtccttgtcgcgcacgaagtcctgggccaggtagccgtagctttcctccccgccgaagacaaagtagcggctgtattccaggcgcagggcgcgcgtctgttcctcgctcatcttccggtagccttcccgcttttccgcaggaatggcttcttcatatttgccgagcttctgggcgatgtacttgaagcccgtgagcacgttgaccacttcatagccgaagtggtggccgatggcgtcctgaaggcccgtcgtcacaaaggttttcaccatcacggcgcgggaacggttggagtcattgatgatgcccaggtcagacatgctcatgcagcggtaccacgccagcagggagccgatctggttgccggtcagcaggtgcattttcccatcttccccgcgaacggccacacccatgcggtccgcgtccgggtccgtggcgatgacgatgtccgcgccggaagcgtccgcctgctcaatggccagggccagggccggcgggttttccgggttgggggaggccaccgtcgggaagcggccgtcctgcacgtcctgcgccgccacggtctgcacgttgcagcccagttccttcagcaggggaacgatgatatggccgcccgtgccgtggaggttggagtaaacgattttggcgccgcccttgctgaagagctccggacggagcagcacggttttcaggcggtccatgtagacacggtcaaaggaggcgtccagcacgtgaagggtgccgcgccggtcttccggcagcggttcatattcctcagaggtcagggagttcacttcctcaatcacggccttgtcatgcggaggcaccagttgggctccgtcgttgaaataggccttgaagccgttgtcgtgggaggggttgtggctggcggtcagcaccacgccggaatccgcattgagttcacggatggcgaaggaaacttcaggggtggcccgggggctgtcgaacaggtaaatgtcacagcctaggtccgtgccgattttcgcgcagaattcggcgaagtcacgggagaagtggcgcgtgtcatggccgatgaccagccggggcttcctgcccgggtccgtggcctccacatgctttttcacgtaaatgatcaggccgcgcatcgctcgccccacattgaagtagttcatgcaggcggttcccacgcagggatattccgggcggccgttcacgccgccgttcccctgctccgcccgggtcacgatgctgccgatggtgcggccgcgcagcccccccgtaccgaaggccagggtcttgtaaaaacggtcattcaattcctgccactccccggcggcggccagttcctctacggcctcacacgctatgggggatttggttccggccagcagaaggcggatattggtcagggaagactccaaaagctccccctctttaacggcattcgtcagggattcatccagtgtattcatgctggcggaatagtacatcatggcccttgtttgacaatagctctttccaccatggcctgagaaaaaccgccatgtgcgccacggcacgggcgcgggaaaagccttccgtccccgtccccccctttcacctagagggactggcggtcatacaattcccggtacagcgggcaggaggcataaagttccgcatgagtgccgtccccgatgatgcggccgccctcaaacaccagaatgcgcgtcgccacgcggatggagctgaagcggtgggctacgatgagagccgtccttccctccaccaggcggtccagctcctgctggatctgggcctcgctttccgcgtccagggaggcggtggcttcatccagaatcaggacgggggcgtctttcaggaaggcgcgggcaatcgccacgcgctggcgctggccgccggacaggccgctgccgccgtcgccaagcatggtctggtagccgtccggcatccccatgatgaagccgtccgcggcggcggcgcgcgccgcggccatcacttcctcatccgtggcgtcctgccgccccagccggatgttttccatgatggtgccgtggaagagcacgggatgctgggaaacgaaggcaatgttcttgcgcacatcgtgcagggaggcgtctctcacatccacgccgtccatgcgcagggtgccggaactgacgtcgtaaaatctgggcagaaggctggcaaacgtggttttcccggcgccgctggggcctaccaggcccaccacttccccggggctgatatgaacgtcaatgccgtccagcaccttgcgggcgccgtcgtaggagaaggaaacgccgtcatagtccagacgcccggaggctcgccccaggggaacgggattggcggcttccggcatggtgtccggctccttcagcaggtagttgatgcgttccagggaggcatgcgcgcttttcaggttggtcagcgtcacgcccaggcgcttgagggggtcgtaacacatgaagagggcagcggccagggccgtgaagtcagccttggtgattcccatttcatggcccctcaccagcagaatgcccaggcccagcgccgtcaccatttccagcaccggcaccaggaagtgcctgtacttcaccgttctcagattgatcttgaagaagcgttggatcagccccaggaaaagccccacctgctgttcctgcatgccgtaggaacggatttcacgctgggccgccaggttttcctgggcggcggccgtgatattgcccagctcgtcctgcgcctgcttggccttcttcatcacgcggcggccaaagaagcggatgggccatatcgccagcacaaccagccccagattcatcagcaccaccgccgtgttcgggtcaacaaagaccttgtacaccaggaaggcgagtgcggtcagcagggtaaggggctgtttgatgatgtcattggccgctattaccaggcctccctgcacgttggccgcgtcattgatgaggcggctgatcaggtccccccgtttctggcggtcaatgaaggagaggggcagcgtttgcagtttggaaaaggcgtccagcctgatttcctccagcaccttcatgctgacgatgctgatccagtacacattgaagaacgtgcctatgccccggatggcaaaaaccagcggcagcagggaacatacggccacgagcacagcggtgtgcatgtgctccggggccaccagatgggcgatgatgttctgaagctccgggggaatctgcgtattgtcaaacaccaccggaaacaccttggcaatcatcagcgggaagccgaaaccgctggcggcggcggccagcgccccggcggccagcgcggcgatgaacagcttcatcaccggcttcaaataccgcgcgtactcaaaaaactgtcttaacatgaagcgcctccttcctcttccgcaaccatctgctgcttgttgtaaagttccctgtacaggggggaggaggccatcagctcctcatgcgtgccatccgcaatgacgctccctttttccagaaccagaattcggtccgccatccggatggtgctgaaccggtgggcaatgatgaaggccgtgcgtccggaagccagcttttcaatctccttctggatgagttcctcgctcttcatgtccagggaagccgtggcttcatccagcaccaggataggcgcgtttttcagaaaggccctcgccagggaaacgcgctgccgctggccgccggaaagcccttcccccatttctccgatcatgcgggaatagccttcccccgtctcattgatgaagctgtccacggcggacatgcgcccggcttcctccacctccgcgtcggaagcgtccggacggccgatgcggatattgtccgccacggatccgcggaacagcacgggatactgggaaaccagcgcgatatgggaaagcaggtccttcttggccatctcccgcacgtcgatgccgtccaccttcacgctgccggaaagtacgtcgtaaaaacggcacagcaaattgatgaaggtcgttttcccggcgccgctggggcctaccagggccaccacctggccagccgggatgcggatgtcaatgttcttcatgacgggagcatcctgctggtagccgaagcacacattgctgaactccacttcccccttccaggcttccggactcttcgggttttccggttccggaacgtcgtccggagcgtccagcacatggttgatgcgctccagcccggcattcagggtttccgccttgttgtggaccgcccctagcttcttgaccggttcatagcaaaggtacatggccgtagccagcgcggcgaagtcccccatgttcatgccgttcatgttgccgacaaagagagtggccgccatggcgatggcgctgacgaattcaatcaaaggcgtcagcaggctctgccacctgaccgcactgatggaagcctggatgtaacggtgaatcctgttcctgaacagacttgtctgctgctcttccagttcaaaggcccggatgtcccgctgggaggaaaagttttcctgaagcgtggaggaaagatccccctggctggactgcaccacgcgagcgcgggcgagcattttcttgccgatgtagcggatgggaatcacgcagacgcccaccaggagcatgttcgccagcaaaataaggaactgctggctgacggaggccctgtaaatcaggaatcccagcgcggccaggagggtcaggggctggataatcaggtcattggcaatctgcaccaggccgccctgcaggaactgcgtgtcctgcatcaggcggctcagcaggtctcccttctgctggcggtcatgaaaggccagggataaatcctggtatttacggtacaccttgagccgcagcgtttccagcacgcccagccctattttggaaagcaggtagacattgacgaaggaggagaggccgcgcaccaccactaccatcgggagcatggccgccgtggcccacaccgtcacccagggcaggttttccggactcacgtaccagaggagcacgcgctccgcccacgggggcagcggcttcccgtcaaagatcacggggaacatttcctgcaaaatcaccggtatgccgaagccgctggaaacagcggccaccatgccgccgatcacagcccacaccagcgtgcccttataggggagaagatattcgcgccataatgctacggcgcgctggatggaggattcctgcccctctgttgactgtttcctcataagtaattccggattgatgcgcccgggaacggacggcgcgcaatcggtgcagatcataccatgaagatcgcggatgacaagctccttgcgataaaaactcctcaggaaacgcccggagggaaagccgccgggcatcccggcttgcccgcctccccggaatggtctaccctgccggcgcatgctgaagacaggattaatccagccggagaccatccccggccatttccccaggaacctcagaaccatcgtggaactgtaccgttcctgcgtggacggcggggcggagctcgttctttgtccgccgctggccctcagtggcgcgcacaccggggaactggccctgcgcagcggcttccggtcccagcacagggcggcccaggcctacctggcgcgggaaatagcggacgtccccctgctgctggcagcagcggacgcggacggcagccgcttccacatgctccggaacggcctttcctttccacggcaagccgttatttccccagccgcacacggaacggaggccgttcccgttttcggcatctgccggacggcggatgaagcgggtttttccatcatttcatggccggaatcttccccggcatcttcttccgtaccctgcctcttgctccgcacccattccggcgcgtggcatgaaggactgctggagcaggatgaggaggaagcctgccggctggcgcgggaaacaaggctgccggtcctcactgcccgcctggccgggggagaaggcccgtttctgttacccggcgcgtcttccgcatggtccgcccacgggattctcctcaaacggctgcgtctttttgaacgggattccgccgtcatttctccggaaaatcccacggaggcgtcttctccgcttcccgctccggaagaacagctccggcacgccctccggaaaggcacggcggacttcatcctgaaaagcgggcatggcgccgcctgcctgaacctgctggaaagctccgcatccctcctgctggctcaactgttaaaagaggaactgccttccctgcccttgacgggcttcatcccccgcctccccggcattccggaacaggacactgcccgggcgcaagcctgtgcggacaagctgggcattcaggcccggatgctgcctctccccgcagatgcggcggccggaggaccggatgacctgttcacggccgcatggctcatgcgccaatggacccaggaggaaggtgccctgctgctgtccgccctgaccggaacggacatcatgaccgctccccgcctccttccgccggccctggccgctgacttcatgccgctgggggatttatatgaaacggaactggcggacctgttccccggcttcctttctcctgcgccggatgcggccatgcgcgacagcctcctcatccgtctgcaccgcgcgcatgaatccgccacgccgctggcaggcctcttcccggaatcggagcttgaaatccgccgctggcagcgccgggcccgcgcctccgaatggatgcgccggaaactgccgccgcgcctcacactgcgatccattcccggtgcaccggaaacgccttacgtccaccggctgacggattgacgcggcgcgttgcttttcttcccgtggcgtacattgcgcttgctcttgaagtggaagaagtgattagtagaagccatgcaattctatgtagccaccatgatcggccgcgccgctctaaggctggttgaccgcctggggtcaatcggattgctgctttaccaagtgaccgcatgcatgtggtccggcaaattccggatgcgcgttcttgtggagcaaattgcaaaaatcggggtgcagtcccagccggtggtcatcatcaccggcgcgttcaccggagccgtgctggaagcccagaccctgttccagctccagacggtgaggatggaaaccatggggggcgccgtcgtcgccgtgggcatgttccgggaactggggcccgtcattaccgggctgatgcttgcgggccgcgtcgggtccgccatggcagcggaaatcgggaccatgaaagtcacggaacaggtagacgcccttaactccatgaacgtggacccggtggactacctggtgaagccccgcatccaggccatgctcatttccatgcctatcctgatgatggaagccgtgctggtgggcatcgcctccgcctacatcgtcagtatcacctcctttaacgtggaccaggcttactggatgcacttcatgagcaaattcgtcaccatgggggacatcaccgtggccctggtcaaagccctggtcttcggcctcatcatctccaccatctcctgccgggaaggcctgaacaccacgaacggagccgttggcgtcggcaaatccaccatgcaggccatggtgtatgcctccgtggccctgctcatcgccaacttcattctgaccatgattctcaattccatcttccccatgggattcatgagataacccttccgcgccgccatgcagccattcatccgcgtccaccagctcaagcaaagcttcggtacccaggaagtgctgaaaggcgtgagctttgacgtgggaaagggagagctgatggctctgatcggcgggtcaggggctggaaaaagcgtcatcctgaaacatctggacggcctgatggacccgctggacggctatgtggaaatagacggcaggcgcatcagcggagcgccggaaaaaatcaagaagcaaatccgcggtaaaataggcttcatgttccagcagggggcactcttcgactccctcagcgtaggggaaaacgtcgccttcccgctgcgcgaggaaggaatccggaatgaaaaggagctggacgcgcgcatctccgccgccctggactccgtggacctgctggggcagcaggaaaaaatgccggccagcctctccggaggcatgatcaagcgcgtagccgtagccagggccatcgtcaccacaccggaatgcctgctgtatgacgagcccaccgcaggcctggaccccattgtcacggacagcatcagcttcctcatccggcaaatctgcaaggacaagggaatcacgaccgtcatcgtctcccatgacatgcccagcgtgatccgcattgcggacaaaatcgtctatctcaggaacggggaagtttactggacgggaaccccggaggagctgctgcattccagggatgaaaacctgcaaaggttcctgtacggggattccggggaagactgggcctccctgaccggcaggcatgaaaactttcaacgggttctgctggaacgggcggaacgtgaacggaaacaataaccatcttaccacagagccatgaagcagaaacttaagccggaaacctgggtgggcatcttcctgattgccggaatcctgatgatcatcggcgtcatcctggggttcggcaacatcaagacctccaaggagcaaacctaccccatcaacatcattttcaaggacgcggcgggcctcatcaaggactcccagctccgcctgggcggcgttacggtgggaaaggtcaccaaggcgcccgaactcctgccctccggcaatgaagtcatgctggaagccagcatcctgagcgacgtgaaaatccaggaaggctccgtcttccgcgtggacatgcagaacatcctgggagacaagtacatcgacatcgttcccccggcacgccccacgcacgaatacatcccgccccatgccaccatcatcgggcagcctgaaagcgacttcagcaagatcaagaataacgccgtgggcgccacggaggaaatactgaaaatcctcaagcagattgaaaaaaattcggacaacattgacgaggccattctcaacatcggggaagcggccaaagggctggcccagaccaccaagctgatcaatgaaggcatcctgagccgggaaaacctccggcacctcaacagcgtgctggctcaaatgaacaaagcgggcgaacagctccccgcgacaatggcggccatgaaagacaccgtcagtgacgcccgcagaatcatcgccggagcggaagaaaagctcaacagcctggaccccgccatcaaggaaatcccccccacgctgaccgccctgcgcaaggcttccgagcaaatcgcctccgtcacggcggacgcccggaaaaaccagggcttcctggggctgctcatgtacgatgcgcgcttccgcgccaatgcccaggaattcatccgtaacctgagggactacggaatcctgcggtaccggaacccgaacgagccccaggccaaaccagacccccgcggcggtttttcaggaagccgccgctgaggaacgcgcacaattccgggtgaagccgctttacacacttgccaatagagggaagcgtgctaaataattcccaatgtgagaggcgaaaacatgtaagccgacatgtttttcaacaggaaccaacccttaacactctaatcaaccatgcaagacaaccaaaccgaacttgaaccgaccgcagcagcaaacgacaccgcctgctcctgcccttccgcccgcgagcttgccgtaaccagatttcaacaggccagggccttcgccgcggccaaagtaaaccaaatccgcaaggcggctacggaacaggccagcaccatccgtgactacgcccaggaaaaaggagaagtcatccgtgacaaggccaagaagttccatgaagcgggcgaagaatacgtgaaggaaaaacccacccagtccgtgctgatcgccatgggcgtgggccttctgatcggcatgctcatccgccgccgttaaccctcattccgcgccatgcgcatcaagcgcatggcgccctcaccccttcaaaccgagccatgggactgattgacaaactcaaacgcaccttcgtcgcccccattgtggaggaaaaggaagaaggagcggctatggtccggtccctccgggaaaccggagcggcggcgcttgaccatgtggaagccctggccgcgctgctcaagctggaactggaggaagcgtccaaaaggctgggcaggaaaatggccctgctcctgctggccgcctttatggccatcttcggctatctgttcctgtggtgcttcctgaccatggtcatggcccacttctggggaatcattgccggacttgccgtaaccaccggcatccatctggtggcggctgccgtggccctcatccttttcagccgaacccatgtaacgcccatcgccccggcgacggcggaagaacttaaaacggatttatcatgtctgcaaatggctctcaagaaaagctcgcactcctgatgcgggtggcttcctcccggctggatatcgtcaatgagacggataccctggtccagaagacgcagcagcaggccgaccacttccggaagctgaaaaaaaaggccatgtccctgcctgtgatcggctccattgtcggcacggtgggaggcattctgctcatccgcatgtttacgggaaaaaaaagccatccggcgcccccgcgtccgcatgtttccggaagctggatcaattcccctatcttccgtttcatcattgaaatcctggtaaccctcgccttcccgtccctgaaaaaaatgggcttcgacctggcaggcaagaaattcttcaacctgttcaagtaacaggattttccggtcgatgcggcgcagccttttcaagccgctgctttaaaaaagaactcaggaattccgctgttgcgggagaaatgtcttcatatccctgcggcgtcagatgcgcgccgttccgggaatatcgtccccccctgcaggacaactcttcatgcagacggccgcgatacctcataaaataacgacctgtcgccaaagaaaacaacgcccctttgttcatacgtacctcgccaggctggacaggcatttcggcatggtccatgcggcgatattggaatgaaacaggagaccagggcatgcctgaccccaaaaaggcatcggcagctcaattcccctttccagcgctttccgccatgaacaattcctgccaaaaataacagggcacaatcaggaaaaaagctacctggccatgaaagggaggccccaatataggaagacgaccatcatggcggaaacatggccttcccagtcatcgcggcggcggggaatttggaaatgttccttccgtgtccccgttcggaggaacaggaaaaattgatgaagaaagtcatttaaaacaatatcccgacctttcccccggaggcaaaaatgcaaccgcgccatagacttgtcctcaatgccgccatttcacatttaaccatgaaaacagcagcgggattgctgtcggctctttccgccatgccaaacgtatgcctctgccgggaaagtccgtgaaaaaccgcgatccctcaggatccggttcccgaaacggcagaaaaacataaatgctctttcccgctcccggaaataaacttttgcgagccttcctcaaggcttctctccaaaaatcctcccccgccacgggacggcacagggccgcctgcacagaaatcatttcccaaacattttttgctggtcaaaaaagccccgttttcgttagtatgtagctttatcagtttgctgcattcacaacatgagcgaatacattttgccccacgtcgacggatatcttaagcttggacaggactttgactgttccgatatccaccttgccgtcaacagccgccccacctggcgccggttcggccagcttctccccatctgggaggaagcgcccaatctcacgccccaggacacggaagttctggcgaggggctttctggaagacccggaatggaaccgccttcaattaaagggggacgtggactttgcctatgccaacgacttcggacgctaccgcgcttccgtggtcaagcagcgcctgggctatgacatctgcttccgcatcatcaacacgcgggtgcgcaccatggaggaaatcggcctgccgacggaatacgtggtgcccctcacccgctacaccaacggcctcattctggtgacgggctccgtgggttccggtaaatccaccaccctggcctccatcgtggacttcatcaaccaggaccgccacgaccacatcatcacgcttgaagaccccatcgaatacctgattccctccaaaaactgccacgtcaaccagcgtgaagtgcacaagcacacggaatccttcgcgcgcgccctccgcggggccctccgtgaagacccggacgtcatcatggtaggtgaaatgcgcgacctggaaaccatctccctggcgctcacggcggctgaaaccggccacctggtgctcggcaccctgcacacggggtccgcagcccgcacggtggaccgcgtgctggacgtcttcccggtggagcagcgcgaccagatccgcatcatggtcagtgaatccctgcgcggcatcatctcccagcagctcgttcccagggcggacggcaacggccgcgccctggccattgaaatgctggtcaatacacccgccatcgccaactgcatccgcgaaggaaagacattcatgattcccggctgcatccagaccgggaaggcccagggcatgatcctgatggatgactccctccgggcgctgcaccaggcaggtctcatcaccacggaagactgcatcttccgcgcggaagacaaaaccatcatgaaatccttcctgggaatcaagtaacctttaactttgacacactcctgttatggctgttatcgaccaatacttcaaatacctcgtagaagcgggcggctccgaccttcacctcagcgaaggccagcctccgaaaatccgcgtcaacgggaccatctccgccatctccgacgaaaacctggaaggccagtcgttcaaaaaccttctcgcggaaatatgcgactcccaggccttccagaaatacctggaagaaggggatctggacttcgcctatgaaatggatgaaacctcccgtttccgctgcaactacttcaggcagcagcacggcctgggagccgtcttccgtctcattcccacaaaaatcgccacgctggaagaactgggcgtgcccacggtcgtcaaggaattcgcccacatgagatcagggctggtgctggtcacggggcccacgggctccggtaaatccaccaccctggccgccatcattgactacatcaacagcaaccaggcgcggcacatcatcacggtggaggaacctatcgaattcgttcaccccaataaaaaatccatcgtcacccagagggaagtgcccctccagacaccctccttcgcagacggcctgcgggcttccctccgtgaagactccgacatcgtgctggtgggtgaaatgcgcgacctggaaaccatctccctggcactcacggcggctgaaaccggccttctggtattcggcaccctgcacacgaacaacgccagcaaaaccattgaccgtatcattgacgtattcccgtccgaccagcagtcccaggtacgcaccatgcttgcgggctccctccgcggcgtcgtggcgcagctcctgatgaagcgcagcgacaagccgggacgcgtagccgtcaatgaaatcctctttgccacgcccgccgtggcggccatcatccgtgaaggcgccacgcagaaaatccctgacgtcatcgtcggcggaaaggccatgggcatgcaattcatggatgacgccatctggcaaaaactccagcagggcgtcgtctctccggaggaagcctacatgaagtgcattgaaaagaagaggttccgcaacttccttcccccggaatccgtccgtctggcagactccggcggtggaaactaggccctttgctccttccctgtccctcccatgtcccccactggaaaattcacgttcaagctcgtgatctatggagcattcctgctctatctggtgggggatttgtttctctggcacggcttcctggccggcaggatggacgcctacctgaaaccgatgccgggaccgcccggagacaactccgcccggattgcggaagtttacggcgaacccgtcaccgccaaccagctctcccggagggttgcggaactccggctcctgcgccagcctcccgttctggacatggacggaggcatcaggctcacccatgaactggacgtagccggagacctggctccgcgggccaggtacgatctgatcggctcctccctcctgcgcctgaaaaccagcgtcaacgaccttcagcttcccaaccgcaatgcggaagccgcgcacgccgcggaacaaatccgttcccgctttgacgggaacacggaacaatacctgaaaaccctgcatgaccagaaattcacgcagcagcaattccaggaaaaaatagcggcgcggctcaagcagacggaacagctctaccgggcgaccgcccaggcggcagagccgtccgacgaagacctgaaaacctattatgatttgatccgggaccagcttaaaacccctgacctccggaaaaccaggcacatcttcctggctacccttcacaaggatgaaacccaggtcaaacaggcggcggaaacgctgctggcgcgcctgcaaggcggggaaaccttctcccggcttgccagggaattcagtgaggacgagcgctccgcgcccgcaggcggggaacttggctgggtcagccccgcccgcgcacgggaaaccctgggcctggagctggcaaacgttcccgacaacaagccggtgcttcttaaaagccggtggggatggcaccttgtggaagcctcccccctcaaaaaaggaagtatcccttcctacgaagaagcgcttccggccctgaggaatgcagcccaaagcctcagaaaagcgcaggccgtggggctgtacatggagggcctttttgaagaagcccacctcaggagccgcattaaaaacaagcgggatcgctgatgccccagttccaatgagcgccccttcctccttcattacaggcatctcattaatccgcatcatcctctgcctgatgatctgcgccttccactgggcgcgctggtcgcccgttgcgggctccgtgggcgtggactggttcatcgtcctctccggattcctgatgacgttcaccctgaaagaaaattcgttcagtccgccctccttctacatctccaaatttgcgcggctgtggccgctcctgttcacggccatcctcctgtccagcctggtctcctacaaggagcaattccagctggacaacctgctcggcgtcctgctggtttccttcggcggcaatcaattcatgaacctgcacacgggagacaattatgccttatggtacatgaagctggaaatcctcttcgtccttatcttccctctcgtggcctatggaaggaaacgccttcccctgctgctggcgctgggccttgtaaccgctgtcgcctgcacgttcctggaacccgtcgcacgcctttacttcttcccgccctaccgtttatggcaatttctcgccggctgctgcgcggcacggctctataaaaaacacgaacgcttcttccggtggagcccggctgtgttctccttcggggtgctctaccttctctaccagactttcatcggcgccttgtggggctccggcgggaaagttgcctccctggccttcctccttcccgacacgctgattgccgtgctgaccatcgccagcgcgtgctcacttgcaaaatcccctcagccgccggctgttaaaattccagcggtgctcatccatttgaccaaccgggccagcctcctgacctatgccgtcttcctgctgcatgttcccctcctgcaattcatgcagtacatctggccgcaggaccggtacggaacccgtcccatcctcttctggatatgcgccgcgctcctgttgattgccgtgggagccgccatgcattacggcattgaacaaccatgcggaaaatggctttcctcccgcttgaaacgtgcctttgccagagtccggaacatcaaattcaccgctctttgaactgccgtccgctttctacgggaatacaggcattccttttcccggttcccgtattgcgccgtctcccggccctttccggaaaaatgaatctccccccctgcggcagacttccgccggacaggaaacggcggcatgcggagaaggaacacgaaatcttccatcttatttgcgttgcctgacgaattcctcttgctttcaggcggcggatggaatagattccccccggtattttccacggggtattagctcagttggtagagcgtctcgttcgcaatgagaaggtcaggggttcgaatcccctatactccaccatccatctctctttcccgccattgtcttttatgcgggaatcacgggcagccctatgaatggtaatttatttaaaattgtactgatttcagtagttgccattctcctagccatcataggcggtgtcatgtcggcggatggagaccccttttccatcgccctggctgtttcccccttcctcctggccgtccttttcctgatgaaggaaaaggtatggtacctgtggatatggcttcccctgctcttcctgcccataccggaactaaaggactacgcacccctcttcgcctacggcattaccattcccttctacttgtggaatgccatgctcaagcgttcaaccctgacatggaatgccgcccctctcctggacgctgtcattctcgtgctgttcatgcatgtgggctacgtcttcctgagccaccccttcggcctgggcctgaatgtgctggaagactactacgggggcaagggatacgtcctcttccttcaggcgctccttgcctatctttgcctctcctccctgaaaaccaccagcaatgaactgggaaaggtgcttcaatgggccgtttttctgaccattatcttcacgctgatctcaaccgcccagggcatcctttcaccgaattctgccggagcgaacccggcggcggccgcagtctcggcaagcgccgcctccgaagacacgcggcaatcgaccttcctccaaatttccctattggcggttcaactactcatcatcaactactccgtatggcagatgatcaaacgtccctggtggggcgcccttcttgtccttggaaccatcggagtcctgtttagcggattccgctcctttattgcgcagcttctgctcctgtttttcacaatatctctgatctacaaaagatggttcttctgcatcctggttcccatcttcggaatgcttttgcttctgctcctctcctcctcaggaatgctccattcctttccttacggtatccagcgcacactttcaacccttcctttcctggatgtcagcatgcaagccagagtaaacgcggaagcgtccatgaactggcgctttgaaatgtgggaatgggctctggacgaccgcgaacacttcattcaggacaaggtattcggagacggcttttcacgggatatcagcatcgtgaaagccaacatctatgaggaagcctacaacctcagccaggaccagtcatcctttgcctggaacgggctatggcacagcggccccatttccaccattcaaacgcttggctacgtggggctttccctgtacctcattctgtccgtcatcggcatgacctatgcatggatcgtcagcagaatctaccgcaaccacaaatacaagctgggcattctttacgtttcaaccgtctacttcatcaagccgctcacctttctgctgatcttcggggatagtaccaccatctccatggacatcatctccctggccatcatcaaggtactcttctcctgcgccaaaaaggaaggcctgtacgtatccctccacatccgcaaggaatacatgccgctcattatccggaagacggaggcaaaaccgcagcctgccgccgcgcccgccatttccgcctgaccgttccgcccctactccggaaaaacgggcgcatctgatgcttgaggctggactaattcaaggggagttgctacctttcgatgcgtttcctcttctcatggcagcagactctcctcatcatatcatcggcctcatcccgtcacgctgggggtcctccagatttccgggcaagccgcttcacctcattgcaggaaaaccgcttgtccagcacgtatgggaacgcgtttcccgctgctcccgccttgacgacatcgccatcgccacggacgaccagcgcatcttcgacaccgccgtggccttcggcgccaaggcgatcatgacctctccggaccatcccagcggcagcgaccgcctggcggaagcggtgcaagccttcccctccgccactcatgtggtcaatatccagggagacgaacccctcattgacccggccctgattgacaggctggcggacgcgctggtttctgacggggccctgtccatggctaccgtggcctgccccatcagcgcgcaggaagacctggacaacccgaacatcgtcaaagtggtcctggccggcaacggcgacgccctgtacttctcccgttccgtcattccctatgcccgccatccccgcgtcacccccccgctgcgccatctgggcatttacgcctaccgccgggacttccttgaaaactacgtgcgctgggaacccacccccctggaacaaacggaatccctggaacaactgcgcgcgctggaaaacggcgccagaatcagagtcattctgacggaccatgtcagcgtgggcgtagacacgccggaacaggcggcccaggtggaacaaatcttattaaacatacattaagaaccataatcatgaaatacatcttcgtcacaggtggtgttgtctcctctctcggcaaaggactggcggcggcatccatcggtactctgctggaacgctgcggtctcaaggtcacccttcaaaaatctgacccctacttgaatgtagaccccggcacgatgagcccgttccagcacggggaagtgtacgtcttgaacgacggggcggaaacggatctggacctgggccattatgaacgcttcgtccattgcaacctctcccgtcttaacaaccttacttccggccaggtctttgaaagcgtgctgcataaggaacgccggggagactatctgggtaaaacggttcaatacattccgcacgtcacggatgaaatcaaaaaccgcctttatgaagtcacggaacaatcggacgtggacatcatcatcacggaaatcggcggcacggtaggggacatggaaggccacatcttcctggaagccctgcgccagttcgcgctggaagtgggccgcgacaatgtctgcttcatccacgtcaccctgctcccctacatcaaggccgccggggaaatgaaaacgaagcccacccagcaatccgtcgccaagctccgggaaattggtattcagccggacgtgatcatctgccggacggaatacgatatgagcgaagacgaaaggaggaaaatcgccatgttctgcaacgtggaagccaaaaatgtcatcgccttccgcgacgttaaaaacaccatttacgaatgtcctctggacctcagccaggacaaaatagaccgcatcgtcaccaagcgcctggggctggacgttcccgctcccaacctggcggactggcagcgttacgtggggcgcgtcatcagcccaagccactccgtaaggattgccgtagtcggcaaatacatcgcccttcaggacgcttacaaatccatctatgaatccttcactcatgccggtgctgaaaatgacactcgcgtggaaatcctccggatagacgcggaagaaattgaagaaaaaggagcggatgccctgatcggttccgtggacggcattctggtgccgggcggctttggagaccgcggcattgaaggaaaaatacaaacagtggaatatgcgcgcaccaagggcatcccgttcctgggcatctgcctgggcatgcaggtagccgtcattgaatacgcacgccacatctgcggcatggacgatgccaactccacggaattcgaccagaaatccacccaccccgtcatcagccttcaggaagagcagaaaggaatcaaagccatgggggccaccatgcgcctgggctcctataaagccctgatccagcccggaactctggcgcacaagctgtacggcaaggacagcgtcacggaacgccaccgccaccgttacgaattcaacccggcctaccgtgaagaactggaaaacgcaggcatggtcatcagcgccgttaatgatgaacacggcctggtggaagtcgtggaacttccctcccatcccttcttcattgcctgccagtaccatccggaatcccagtccgcacccaaccgggctcatccgctcttctccggtctggtttcagccgcgctggaacacaagagccgctcctgacccttcacccagcccggggccttttccggaaaccctgttccggaaaaggccttctctttccaggcatgttcacggacctccttgtcatcgtcgtctactttctggctatcttctgcattggcatctatgcgggacgcaggcagaactccctgacggactatgccctgggcaaccgctccctgccctggtgggccattctggcctccatcctggcggcggaaatcagcgcggccacctttctgggggctccgggggaaggctaccatacccgcaacttcacgtacgcccagctctgcatcggcactatcctgggccgcatcatcgtcggcaagctcttcctcaaaccctactatgactacaaggtggtctccatctatgaatacctggaaaaaagattcgggctcctgacgcgccgcacggcctccatggtcttcctggtcagccgggtgctcgccagtggaacaagactttactttgcaggcattctgctggtcattgcctaccaattcatgacggacaccacggcggacgccaaccaaattgtcctgctttacattgccgcgctggtcgtcatctccatcgccaccaccatttacacagccatcggcggcttgaaagccgtcgtctggacggatgtcctccaggccgtcgtgctgggcgtctccatgctctccgccctgtgggttctcttctcccacattcccggagggtggaactccatctcagccgccatgaacggaggggacgactggaaattcttctcgtggggcaccaaggaaggcctggacttcctccagcaatgcgcccatgtcctgggtcaggaatacacggtatgggcagccttcctgggagcgaccttcatcaccatggctacacacggcacggaccaggacatggtgcagcggatgctggccgcaaaaagcagcaaggcgggaacgcgggcagtcatcgtatccgggctgctggacttccccatcgtcatcgtcttcctcttcacgggcattcttctctacgtcttctaccagtacaatccggcgtccctccccgcagacacgccgcagctccatgtcttcccttacttcatcatccatgaactgcccaacggcatccgggggctgctgatcgccgggctcctggcaaccgccatgggttccctgtccaccgctctcaactccctggcaaccaccgccaccaaggactggtaccagggagtattcaaaccggaagccacggaacgtcagctcctccggtgcgtgcgctggggaacggccggcttctccctgctgctcatcctcgtcggttccatcacggcgtggtacgtggtgcaccacccggaagtccgcatcattcaaatcgccctgggcatcttcggctacacctacggctcgctgcttggcatcttcctgctcgggatgctgacgcgcaccagaggaaacgattcaggaaacatcattgccatggcggcaggcttcctggtcattgccttgctgaccgaactcatccccctgcccgccgactggaggcaatatattccggaaatagcctttccatggcgcgtaaccatcggcaccctggtcacctttgccgtcggcttcggtttcaggagccgccacatctccgcacgctgaacggcatccgccgttacccggcttgcgttccggctttcccctattaaggaaacttgaaaccttattgcagtttcaggacatcccgttatccattcgacgcctcattcttctgaaaggcatgttgaccaccactcctttgcccataaaaaatgcattctccagcagcgctcttcccgttaccggaacagaaaagcaaaaatgaaggtattctttgcaagtctccaacatatgaaaccggctgtggaataaactaccgcttttatctttccaggaaggccccctccttctatccaacggcacctatcctctcccaaggagaggaaaagaaacctggttaagaaatcgtcacaatcagcaacgcattggcagaattacagttgtgcaacacccccacttcccgtcttccatcccgtccctattgtctaaatagtccatcttgtctaccggcagaaccccgccgtaaaaacaatcccttccctccctcttccctattcctcccccttaagcacaaaaagagccgctccccgtggatgggaagcggcgctggccgggaagaagaaaaagaactctctcttttattacacctcctcgggagacagccagcggaaggagacgatgttgaacttcctcccgaacgccttgttcaccgcgctcagctccgtctcctccagcgctccgctcttcatgttgatcttcttgaccggcgtctccgggctgtccaccgggtccacgtagttgatccccctctgcaccaccgcctcgcaccacgcccgcgacagcaccacaccctcgcggttggtcagctccccgtaggcccggatcgtaaacgtgtcgtcgcgcgtcgttaaaatattgcccagcaccgccagcacgtcggactggatcaggtagccgggcgccgccgtgtacaccgatcccttggccgcgtcctggttcgggtaccctcccttgggcgtgatgaccatgtcggagagttcgtcaaaggtgctgttgatggagctttcgtcgatggccgcctgaagcgcccccttcacccccatctccccgctctgcaggcggcggttgacgaagtcggacatgttcaggaaggggcccctcttcttgacctcctggaccatgttccgggccagggacttgatctgcgagtcgctgagcgttctgaggtcggaccacgccatggcctccccgtccgggatgccctgggttacgcccaccgagccgtagtcgtccacgtgggacttgtcgctgctggccaccccgaagcgggagaaggccgtctggctgttgttgagcacggagggggtcccgctccgggagtagaggagcttgcgctttttgagcccaagcagggtggcttcccaggcgcgctgggaggtggagttgacgttgaagcccccggccacggtgaggtacttggaggcgtgcttgtagccttcgtcggtcttggagagttcttcgacgacggcctcggagggcttgccctggaggtcgggcacgaagcgcctgttggcaatgccggcggccctgttggaggaggcgtccgtggagaaggcctgttgaagcacggttttaagttcctccctgcccgtgcctccgatgctggaggggcgcgcggccagggaggaggcgaaccaggagtcccagagggcgtcgttgaccatcaggccgtggtcccagaagtcgcccagggaggcgtctcccatgatttcattgtgggagaagaccttgtcgggcgggagcatggggtcggcaaaagcgttgccgatccccacgcccggcacgccggactggtaggcgaagcgcttggcgacggccgccttggagtcgctcctgtaccatcccggggtgaggcggcagcctgcgaagccggcgaggctggagggctgctggaaggggagttccgcggccacgatcttgttgacctgctcggcgcccggtccgccgaagggggagagcctggtgccgtcgttggagaggatgttggagatggtgatggggaagaagtcgctgttggcatttttgacttcaaactggtaggggctgtagaggcgtccgagctcggaggcggtgggcatctgcccaccccagaagagagggctggagtgctgccatgtcttggcgcggtagtccttgccttccgggtaggctccgatcaccggaggcttgccccatttgaccgataccccgtagtaggcgatgaaaagagcgtccggatccgcctcgccataatagccctgcctttccttgttctcttccggtccggtattgtttttccacatgtccgccgggaatttgatgttttcaagcagaggtttttcccacgcgccccagttcaggttcagcacggcgggcatcgtcttggagaagatggcggggtctgccgtattggcgccgttcagcttggtgggttgtcccatctgctccgctctcatgagaccggcccccatcgtgaaggttcccagttttttggaaccggctccgaattcgtccgtatatttatggctgaggatgtggtcggagggtgtccggtcggcggtcgtgccggaccagcctttcaggtcgtcatcattctgggcgaaaatggcggaggccatgaacgggtctccgtccaggtacttgttgccgtcaaaattctggtatttcaggccggagtacatgttgacggagtagcctgtggtctgggcggaatccagggaccagccttccttcatggcaaagttatccgttttaatgtcaataccattatctttggaccggtagacggagttgccgtggaaggggttggacacgtcatcaatcaggggaataggctgagcgaaaatgacgatttctccggctttcagggtagaaggattacccttgttggttgagccgtccgactggtaggtgactttgtcacggaaggacgcgccgaagtccgccacctggcggtcgtttttgtttatggcattttgaacgtagggagtcaggggatgttccgtatagttgcccatggcccccacaccgccgccgtttttgatgttgtgggagaacatcaggggcatgaagcggtgttcgccgaagtaggccccccatacttctccattggccccctggaatttcatgtctacgttgtatgggttccaccatacatagacgggaatgacggagaaggccagattgatgaatccgccatttacggagggattctggccgtttgttcctccgaatctggcgtactggacgccgacgaaggagtagaagcgcagcagaataggatggcgcatgtacgtgtagcggttgtccatcatttccatgttcgctgtggcgtcagacgcaatcaatgtgctgggggaggtcccgttccactgcaatgtggcggaagcgtcctggccttccctcttcgtggaggagtcccacacgttggcccacaggaagagctggttccaggaggcaatgggccggttctgctcggtcgggctgccgtcctcggacgtatacggccggagaccgatgtctgcggtgtcgctacggaattcctcaggcagcttttcttgagagaatatgatattcaggtcttttttcaatccaccgaatttagaatccgtcagcaggctggaagaaaccagggagatgtcatggtacacctctcccaagtctttcagccggccgtttttactgttagccagcagagaatcaagggaaatgagttttctgactgtggacatgtcgtttccggaactcgatgccatcatggaagaaaggttgaggggctccaaatcaggaccgggcgtgtcccacgtggagcgcatcaccgtcagggcatccgtgctttcttccgaggcatgcggcatcaggttgatgcgcgccttctggttttctcccgttacccaccacgcaatgtatttgcgtgagttggcgttctttttcagccccatggtcttggaggaatcgtccacgcgcaccatgcgggcgtagatttcctttttgtcctggttcttggcgcctacgggcgttcccaccgtgccatggtccaccaaggcgacactgcggaaatttttggttggtaagggaacgtttgcccagcaggcttttgcccgcttccagcgtgctgagcctgcgcaggtccgggtcggaaatgagccagcggcggaacatggactttcttcccgtatcgtaggtggaagaaatgttcatgccctgggagttagtcttgttgagccaggtatcccagctgttccagacgcccaggatgtacggggcgttgccttcgctggcgccggaggaaaggatgcccgagttggcggaaacgcgctggtcgggccccagctcacactggagctgcccgagggccacttccagggaaaacctggcgagggatttggcctccgcggcaaagagctgtttttcggaaatgcggacctgtgaggatgcgatggtgagaaggccaacgctgagaagggccaggagcatcatcagggtgatggtggcaatcagggcaaaacctttgctgacatgcctgataggacgtttagtgaaatgtttaatcttcatgaaaatggtgggttccggcgtgcacttttccgctcaagtttgagggtataaaaatccccactgtcacgaaggtgcgaagagccaattcttaactctagtcaatacaaaaaagaggcagtccatgcaagctcaaaattgcttcaaacaagcgcattgcaggcagaataaattgacggagaaaccatctggaaggaggaaggaagcggggagaatgcatttttatgataatcagttcttaaaatcttatattatggtatttataagaaaaatcggattctaaattcggaggtcttaaaaaggacctcaacattatgttttcccaggaaaagctgcctgaggacttccgcggagacacctcggatatcggtctccggccgtatacgtccgaggacggaaacccatcggaacagaaccgcccgatcggttcctggaaccagctctacctgtgggccaacgtgtgggactcctccacgaagagggacggacaagattcttccgccaccctgcaatggaatgggcgcacccccagcacattgattgcggcggactctgcggccagtatggaaatgatggacaaccgctacacgtacatgcgccatcccatcctgctgcgcttttattctttcgtgggacttaactatgtcaaacacggcaacaagcatcccaaccgcggtggatggattgacttccgtatcgccgtcattccggtgtacgtctggtggaacccctacaatgtggatatgaaactgaccggagccgacggcggcgtctggggcgcctacttcggtgaacaccgtttcatgcccctgctgctttcccacaatatcaaattcgcatggaaccagctggatgaaggccaattgtccaattacggggaatcctgcctggtcccctacttgaatgcttcttataacaaccgccaggtagccgactttggcgcctctttccgcaccacatccaaactcagtggagatggggccacgatcaagggagaaccttctaccttgaaggctggagaaatcgttgtctttgcccagccggtcgtttccaacattgccaatggcaatgaggtttataagacaaaacccaacagcggtgatttcaaaccggacaggttcccgctcaaggaaggttggtcccaggagcctggccaggtcagctcctatgccgtcaacctgacggacggtgttcgctacgaactgctggacggcagtggatataatcagcagggcatcgccaaggcttccattatcttcgcggaagataccagccaactcaatggtacgcccgataatcatgtcctcgccgtcaaatacggggacaagggagcatcaaaggccttgggaaccttcgtcatgggggccggtctcatgaatcccaacaagatgaacagctcctcctccctgaatgggaaaaacacggctgaaatcgacatcttcgccaaaaccatgccggctatcctcaacctgaactggggcgcgtgggaaaaacctctggtcgaccagattaagcttccggcggaaatgtgggaacataatgaaggaaccgatgaagaggccaagaagtcgggccaatacggaactccctctttggattccacgttcatcgcctactacggggtatcggtcaaatggggcaagcctccggtgatcggagcctacccggaaggcaaggactaccgcgccaagacatggcagcactccagccctctcttctggggtgggcagatgcccaccgcctccgagctcggacgcctctacagcccctaccagtttgaagtcaaaaatgccaacagcgacttcttccccatcaccatctccaacatcctctccaacgacggcaccaggctctcccccttcggcggaccgggcgccgagcaggtcaacaagatcgtggccgcggaactccccttccagcagccctccagcctcgccggcttcgcaggctgccgcctcaccccgggatggtacaggagcgactccaaggcggccgtcgccaagcgcttcgcctaccagtccggcgtgccgggcgtggggatcggcaacgcttttgccgaccccatgctcccgcccgacaaggtcttctcccacaatgaaatcatgggagacgcctccctgggcgacttctgggaccacggcctgatggtcaacgacgccctctgggactcctggttcgcctcctccctggccgcgcgcccctccagcatcggaggcacgggcagggaggaacttaaaaccgtgcttcaacaggccttctccacggacgcctcctccaacagggccgccggcattgccaacaggcgcttcgtgcccgacctccagggcaagccctccgaggccgtcgtcgaagaactctccaagaccgacgaaggctacaagcacgcctccaagtacctcaccgtggccgggggcttcaacgtcaactccacctcccagcgcgcctgggaagccaccctgcttgggctcaaaaagcgcaagctcctctactcccggagcgggaccccctccgtgctcaacaacagccagacggccttctcccgcttcggggtggccagcagcgacaagtcccacgtggacgactacggctcggtgggcgtaacccagggcatcccggacggggaggccatggcgtggtccgacctcagaacgctcagcgactcgcagatcaagtccctggcccggaacatggtccaggaggtcaagaagaggggccccttcctgaacatgtccgacttcgtcaaccgccgcctgcagagcggggagatgggggtgaagggggcgcttcaggcggccatcgacgaaagctccatcaacagcacctttgacgaactctccgacatggtcatcacgcccaagggagggtacccgaaccaggacgcggccaagggatcggtgtacacggcggcgcccggctacctgatccagtccgacgtgctggcggtgctgggcaatattttaacgacgcgcgacgacacgtttacgatccgggcctacggggagctgaccaaccgcgagggtgtggtgctgtcgcgggcgtggtgcgaggcggtggtgcagagggggatcaactacgtggacccggtggacagcccggagacgccggtcaagaagatcaacatgaagagcggagcgctggaggagacggagctgagcgcggtgaacaaggcgttcgggaggaagttcaacatcgtctccttccgctggctgtctcccgaggaggtgtaataaaagagagagagattctttttcttcttcccggccagcgccgcttcccatccacggggagcggctctttttgtgcttaaggggagggaggaaaagcaagataggggttataaggtttataggggtaatagggataatgggggggtgcaattatagacgcatattttttaagtgagcctccatttgagaattacgaaaaatataaatctgcaagtacgaggccggcttgctgacatgtttactatccagaaagagaaggaacgtcttttgttcgaggaacttacaaggcagccaattaaagaaaacaggccttctgaaatcctggcaaaatgggcctttgcggatttcaagccgcgggggcctgcatcttttatcccgaacctccgaaagagggtttctatcattccatgtaaccacccccggcatgagaattattccactgcattccagagcagtttttatgtgaagcgggaacggctttttcacgaaatccatcgcgacagacagaccagtgcagagacttctgcatttttgctcgatggggaagacctcaacgaacgaattttcaggcttttcccgaaggcgaaaaagtgaaaagttgtaaagcggatattattttactctccttgccgttatttaaaagagccaaagacaaggtacagcccacattccatagggacgtcattaacccgcttctataaacgttatccaccacttattttttaagctcagcaacagccacttcatgcaatatgtcaaattcagcaggagcaatttcagcaagcagtttcatatgctcctgtttccgtgcctatatcaagcatattccggccacttacacatagtttgcgattgatgattttatcgtaaaattcctgcggataaatatcacggaacattgcacaggatgccgaagttccgccccagtcaaatgcttttcctccgcagatgtctttatctcactttttccgccaagagggcccttcccacaaaacgcatcttacccggccaaggcgaataaccaaggcttcctatcctttaaatgcaattattttcctgtggagatgtcacataacttgtttttcatcattactccatgtacctgcacataagccattttattcattcagatactattttaccctgtgcagatgaggtcatgcgtaacagaaatgctgaatccgcaggctttcccggcagaaaaagggggccaattaccgctggaattttctattttttatcttcaacatccctactttgagcttgcacggccttcctcattcctgtacttcacaagggatataaagtccatcaaggcttgcgtccgtaccctgttgcacgccccgatggattcagcctgctgcattctctcccgcaagactgtccgtcaagggtccatgcgccggccaaaagcccccttttatttttcactcccccgaatatatgcgcattttacccatcctcgcctttacctgccttctcggaagcgtttctttcgtccatggacagacccgcactccttccaagccggagccggctaaaccggaaacgaacgccccggcggctgataccgtggacaagtccctctcccccgccgccgtcaacggcatccggtttgtccttaagacgcccatgcccctcccctctcccatttacatgcccattgattccaaaaggctggagaaagtggaaatccgcgccgcccttcccggacgccgcagcgtttatcccaggagcaagattattaccctgttcggtggcctggaccagaaggggatgccgaccaacaagcttgtcagcaagccccttccgaccgaccttggccccaaaaccctggcgctggtaggcaagaacagcagcggagagtttaccctggattttatcaatgaagcggaacttccgcttaattgcgtttacattcagaatctgaccgggcgcaccttcactctggagcttcccaagccccccgcgggagaaaagagcgccattgaattgcccagcaagtccatttacattttcggcaaggactctacggacagcaacgtttcccgcaccactgccgccaatttgacgtacatgactcgtttgaagaacggcaaagtcgtgaaggtgaaggacaggggcatgatgctgaccacctaccccgggcggaaagtagtgatgatcatttccccggattccaccggacgcaccgtcgttctaacggagctgatgattttcaaggaaaaaccggtggcagcctcttcgggcaagtaagttttccccctcagcctccggcaatacgggggcgaaagatattcaagagccggaaaccaatccggtttattcggaaaaacgggcattactgcccgtttttttacgccatcatcccatcctgccgccattcccggtgaataaaatgctccgcgttttcccggcaggagaaattgccgccgccatttagtttcctcatgcggcaacccattcctccgggacaacaacggcacgattcccacaagagaaggaagtaaaaacagcaggtaaggcagaaagttcctcccggtcaaaaccggacggcatgaagagcacgaagatgcctcgaatactccaggctcccgggcggttcatctcttcacctcccggaaaccaaccgagcttaatagaccttaggcaccagtccctggcggctcatcttgtcctccaccttgcggcggttttcctccaagcgccgtgcgtcataggagtcgtccacaggctgggcatccggaatgttttctccgcggccggcctggtactgctgcacctgcggaagcaccccttccaccagttcccggcatatccaggaggggagaatgtaggtttccgtacgtccggcgcggctcagggccagccccacaaattttccgttaacgtcaatgaccgggcatccggcgcgttccgggaacaacgtcatgtccgactggatgaccagcgggaattcgtcccgcttcaggctcatccggttgcccatggagttcatcatgtccaggcgcttctgggggaatttcatcactttgggcctggggcccgtgaggagcttcccttcaaccacctgatcccggcgcttcacttccacgggaaccgtctcaccggggcgcaccccgaccatggcggcacggatggagtacatgccgtccaccggcttcccattcagcttcatcagcacatcgccggccagcaaaccgctgcggtgcgctccgcttccggcctccacgccgccgatcatgactccctccccgtcccagcggggatcggaaacgatgcccaggtaaggctggtcgtccgcccgcaggctgcgctgcgccacggaaacaaccccgaagtcactgacatgccccgtgggggacacggccgcaatcacgtccccttcctgcgcctgcacgtaggagttcaggtcaatggggggagcgggaagccccgggacgtccatcatcagcagatcgtgttccggcagggcaaagagcaccttggcgtcatacacccgtccggaagagtccaccagcatgaccggccgccgttccttctgaaggtcgctcaacttggtaagcactttccctttccccaccaccgttcccagggccacctgggtattgccggccaccagcgccaccacggactgccccacaggtacagccaccttgtcccattcccggaagatttccttggcctggctatccagcacgattttgtcctccggggctatcatctggtccggagggagcggggacgctatttcctgggcacacgcggaagccgccgcgaatgccgcccataagtatttcatgatcatccttgagtttgttcctggtatttcaggccggacatcagatcgccgcgcctgccgaatgtaagatccgccttgtaggccgtacctttcctcaccactaccaccggaacggtttccccgggacggtgcctgcccagctcacggagcatgtcccgcacggaacggaggctgcggctgtccatgtgggtgatgacgtcccccggcttgatgcccgcggtatccgccggagagttgaccaccacgtcttccactaccactccgtccacgcccagcacgtccatcatggcaaatcccaatacgggggattccgggtcagccatgggatgaagtccaagctggccccagtgccgcccggagagcagcttgtcccagtccctccggaatacggagacggggacatggttgttgattttcaacatggggccgatggaggaatgaatgcccaccagtttgccggacaggtcaaagagagggccgccggaatccccgccgatgagcgtgcattccgagatgagaaagcgctgttttccgtccgtgcacagccttcccatgcggatgggcgcgcggcgttccgggtcaaagcccttggaatggcccagggccaccacaaagtcccccacatgcaggccgtcggattcccccagttccacatggggataatttccgccgtccatgatctgcaccatggcggcgtcccgcgtaaagttggcccccagcacgcgccccttgactacgcgcccgtcggcaaaaaccacgcgcatgatttcatcgccgcccaccacgtgggccgccgtcaggatgagcccctgcggagtgacaatcacgccgctgcccgtctcccccccgtcggaaaccagcgctaccgtagcggccgtgaccctggaagccacctgatgcacatgcttctgcaagtccgccatggaagagacattccccgcaagactcattcctcctaacaacagggacacaagccccccaacgaccaagtaataaaaactcgtcatcctgaatgctgatatcatgaaattatcgataatcgaatgataggacatatcctaccagataaacgttcaaaccggtacgaatttgtctaaggattgcgacatgacgctccatcttttgcttagaccattccggttgtttatgataaaattccctcacggatgggtttaaacgacaaatcacggaaacgaaatgccggctcctggcgggaacgcatccaggacggtgaggcggcttcccgtccccaaacggaacgcaaaaaaaggcctgcgccccgtccgtcctatcccgggctgccgcaggaagatcccggtccggcagtcattcccggccccacccgcagaacaagaaattcccgcagcggttcttcccggcatgacacaccgcccccgcgcccgcggcgcgctgcccgtccggctccgcaggaggagtatgaggactaccctgaagcggaaggagaatcccgttccgcacgcgcaggaaggccgcgcaagccgcgcttcacgattttcggcgccctgctgtttgtcctgctgatgccgttccgcttcatcggctccctgacgcggaatatccgctggttcatcagctggcccctgcgcatcctgctggggtgctgcttcgtcggcattgtaatcggttccatcctggtgttcctttacggaaccatttccaaccgctatgacatttccgaggtcaagagcaacattccggaacgcacggtgattctggaccgcaagaaccggaccatcggcaccctgcacggggaaaaccgcaagcgggtgtccctccgggaagtcccccccattttcatcgacgccctgattctgcgtgaggacaaccgcttttacgaccacggcggcgtggactggataggcgtgggccgcgccttcgcacaggtgctcaagcacaagagggccacgcagggagcttccacgctgaccatgcagctcgccaagatcacttacaaccaccgggagcgcaacctgcattccaagctgacggaggtggctctggcaaagcgcattgaagccacctacacgaaggatgagattctggagacctacatcaaccgcattttctggggacacactttcctggggattgcggcggcggcgcgcgggtattatgacaaggagccccgcgacctgtccctggcggaatgcgccacgctggccggcatcatttacggcccgaatgatttttcccccatcaaacacccggaggaagccaaaaaagtgcgcgacatcgtcctgggactgttgaaaaacgagggcaagatcacggaggtgcagtatcaggcggccctggcggaacccatcgtcacccggactccccagtcccggtcggaggagaattacgccatggaccttgtgcgccgggaactggacgccattctggaagaagaagacatccgcctgggcggtctggtggtccacaccacgctggacctggatttgcagaacgccacgctggacgccatcaacaagcatatggaagcgctggaagcgcgcaaggatttcaagaagcacctggcgtccctgcaagccaaacgtgagaagaagggaatcctgaagaacaagctgaccaccaaggcagaatatgaagcagccctggccgcctggaaggcgctgcccgcggaacggaaggagggaatgcagcctcccatgcccaattacatccagtccgccgccgtagtcatggacaacgccacgggggccctcctcgccgtcgtcggcggacgggatgcggaggaatccaagctgaaccgcgccatccagtccagaaggcagaccggctccctgttcaagccgttcatttacgccacgtttttccagcagggcaattccgcggacacccgcatttcagacgaccggatcgcctacggggaagtacgcggagccgccaactggtccccccgcaattcggacggcacgtaccggggcatgaagccggcctccttcggcctcatcctttcccgcaacaccatgtccgtgcgcatcggcaaccgggccgggctgtccaacgtcatccagtccgcccaactggcgggcttccacgggaatatttcccgcaccccggctctttacctgggcacgtgggaggcctccccgctggacatcgccagcgcctacagcgtcttcgccaacggcggcgtgcgccccactccgtacatcattgaccacattacggattcccagggccagccgcgcttcgccatcaccaagagcaagcgcaccgtgtattcccagcgggcggccaacatcacctcctccatcctccagcaggtctgcaaacccggcggcacggcgggcaggatcaccgcgctgggcttcaagtccccctgcggcggcaagaccgggaccacgaacaattacacgaacgcgtggtttgccggatatacttccaatctcacgtgcagcgtatgggtggggtttgactcctccaccaagattctggagaaaggctacggcggcacgctggcccttcccgtctgggtggacatcatgctggccgcccagaaggagggctaccccgccaacgccatccgcacgcggcccggttcggaaggacaggccgtgctcgtctgccgggagtccaaccaactggcccattccggctgccagtatgccaagacggcgtattttgaaacttccgccggctaccaggcccccaccaggatgtgtgaaaagcacatccccatggcggaaccggatacagaagagaatattccctatgcggagccgctggacggcagcgacgacaatattcccctggccgaacccgtagaagaaacggacgccatcccctacgccacccccatctgattgccttacccttcttatgacttctcccctgattccctggtttctcgcccttctgctgctggccgcctgcgtggcactgctgattctgctgctgcgctaccgggaccgctccgtccggcttgaagcggaatcccgctcctggcaggaacgggcggaggatagaacacagatgctccaccgggcggaagaggtgctgaaggattccttcgccggcattagcgcggaagtcctccggaattcggaaaaacaattcctgaacctggcggaaacgcggctgcaaagccagcgccagcaggccaaccatgacctggaatcccgcaaacaggccattgagtccatgctgaagccggtgagcgagtcactgaaactcgtgcagtcccggctgggagagatggaaaaggagcgcgtgggcgcctatacggacctgaaaacgcaaatccgctacatcctttccgggaatgaagccctgaagaatgagaccgccaggctttcccaggccctgcaccacaacagctcgcgcggccagtggggggaactccaactgcgccgcgtggtggagctggccggaatggtggaatactgtgatttcacgacgcaggagacccgttccagggaagaggaccgggtgcgcccggatatggtcatccacctgccgggaggccgttccatcatcattgacgcgaaggcccccatgtcctcctacctgaatgccgggcagacggacaggctggaggagcgcagccagtggatgtcccgccacgccgcggacgtaaaaagacacctccagcagctgagcgccaagaattattttgcccagttttccccgtgccccgaattcgtcatcatgttcctgccgggggaagcctttttccaggcggccctggaagcggacccctccctgattgaattcggcgcggagaacaaggtgatcctttccacgccctccaccctgatcgccctgctgaaagccgtcgcctacggctggaagcaggagcaactggcggacaacgccaagaaaatctcggaagcgggggcggacctgttcaatacctgctccatcctcaccggccatttttcctccctgggcaagagcctgaaccaggcagtgacccagtataacaagaccgtttcctcctttgagcaccggttcattccccgggcgcagaagttgaagaatctgggcgtcacttccaccaaggacctgcccggctctctggaagacatcaccgtgcaggccaaatccgcagatattccggacattccgtcctaaacgcgcagcagcaacacggcagccatgcccgcgtccggttccgggccgggaatgccgccagcccttgcgttcactgaatttctttgcatccgcaggatgcgctggtgttcaaaaaagcgtgttcgcgactcccgcattgttttggatgccgcaggccacggagcgctccaggattttcaagggatcgtcctgtgggcggaaacgggaaacggcaggctgtcttcatcccgcagccgggcggacagttccgttacagaggcgcacaccggcacacggaagacgtccagcgcggcgcgggaactgtagccccaccctaccagaacaagccgcgttccggcgttcacggccgtgttgccgtcgtgggctgaatcccccaccatgcacacctgctccggctccattccccaagaacggacgatggacagcagggaatcaggctccggcttgcgcggaaagcgttcggaaaagcccatcacctcccggaagggcacctctggcaggatatggcgcaccagcggtcccgtgaccacatgaggcttgttggacagaacgcccagggggtggcctgcagcggccagttccagcagcatttcacggatgcctgggtacggcaccgtgccgtcctgccaggtatgggggtattcccgcatgaatccccggtgcaccgcttcaaaggcttcctccggcacttctccgttgaaacagcctttcagggaagccaggcagagttcccgcgcgcccctgcccaccattccccggatggcattcacggagtgctccggataccccagggacttcaaggccaggttcaggccgcgggcgatgccgggaatggagtccaccagcgttccgtccaggtcaaagacaaaacctgttttcatggcctcagtggcagaagccccgttcggaagtttccacgaacttgacgattcttttcagacaggcattttccgcgtagtccgagttccggagctcttccagcgcttcatgaacggtcagcttcttgttgacgaaaagctttttgtagcacatgcgtacggcccgcaggtcttcctcggaaaatccgcgcctctgcatgccgatggagttgacggagcgcgtcacggccggatggccttccacaatggtgtacggcagcacgtcctggctcacgcgggccatcgcgcccaccatggagtgctccccgatgctgacgaattggtgcacggcgcagcatcccgccagaatggcgtaatcccccaccgtaacgtggccggcggcagtggcgaagccggagaaaatcacatgattgccgatctggcagtcatgcccggcgtggcaggaaaccaggaagaggttgttattccctatccgcgtcgtgccgccgatgtccgtagcccggttgatggtggcgttttcacggaagacgttgttgtcccccacttccagataggtcggttcccccttgtatttcaaatcctggcttttcaggccgaggacggaaaacggaaaaaattcgttgccgcttccgaaggaggaaggtccttcaatgaccacatggctgtgcagcacgcagcccgggcccagctttacatgttctccgacaacgcaaaagggaccgattttaacatcatccgcgatctccgcagtaggatgcactactgccgttgggtgtatttctggcatggctgggacgagtatgaaacaaattcaggtgattaaaaggctaaatcccgcgcggccggtctttttgtcacatttgcccggaggcgcccatgtacgcctccatttccggcagccagggaatcagcagcacgtacatgacctggaggcacaggatgacaagcaccagcgtcatcaccaccttgcggagggtgagtgagtcgttcagcacgtccgtggtgcccagcttcctgtcccagggagtgaagccgaagcggcgcacccaccaccaggaaaagaacagggccagcagcatcagggagggggcaaagcagcccagccccagcaccatgacgaacagggagcgccggaacgccgtggagaaggaaaggcgcttcccccggtagtccctgacggagacgcccagcatggctttccccggagtggtgcccagcgttcccagaaaggcggtttcaatgagcaccatcgggagacagaggtaaaggagggcttcataggaaccgggaagaaaatcggggctgaaggccaggccgaagatcctgagcacggccagatacagcgtcatgtgcatcatcacgtccgccattcttcccagaaaacggacgtacgggtagggaactaccagaggcgtgccttcctccacagccgtttcctcttcttccggcagggaatccgcgtccgtggtgccggcggcggcatcttgcgccgcttcatcctccggcacatcttcctccacattacgccgttcttcctcttccttgcgaacggcgaacatttccttcagcgccggcaggtcatggatgcgcacccattccgcgcatccggcatgccacgcccgggcggtttccggaatgaggcccgcctccagcatggagattacctccacctccggcagggggcccttcttttcatgatcctgaatccagtaaatatccatgggcggtttcctgttacatgctgcgcagggagcgggccgggtcctggcgcgccgtgatcagggccggaatgatggaggccaccacgaccatgacgaaggctttcaccgcctgccacgccagctccgcccagtcaatcaccaccggaatgttcgccgtgccgtggaaagccacggggaacgggtcaaagcctattcccgccagaaagccctggatctgcatgcggtattccagcaccagcagtcccaggcccacgcccaggagagctcccacaaagccgatgatgaccccctgccacaagaagacgcgcaccacctggaacggcgtggcgcccagggccttcatcacggcgatttcctttttcctctggatggaaacggtaaacatcaccgccataatgcagaaggcggaaatcagggagatgaaggacagcacaaagctcatcatcatgcgctccttctgcatgagttcaaaccacgcgttaaagcggtcatgccaggtttccagcgtccacgcggaagagggcttttccttttccagagcctgcatcacgggggacagcatcgtttccacatggtaggggtcgttcacgcgcagggccacggcctgcaccacgtcatcctcataacccagcaattcctggccgatgaccagcggaatgaagagatccgggctgggcgtatgctgggaggcccggtaaatgccgatcacctccagatccttcggcatgaccagctccctgatcttgcggaagcattccatgtccgcctcattcctctgccccgccttgaagccgcccagaatggtttcccattccttccgcgtgccttccgggaaggccaccctgccgttgtccacggcttccccgtcattcagcacggcaagcaaatccatcaggctggagcgctccgcatccctgcgggggacggacagcagcccgttgagcagggtgaataccttgtccacggaggccttgccggccgtttcacgctctccctcccttttcagggacttgccccactccttcaaatcattgagttcccgggcgttcttttccgccagcatcggcagttccgtctgctggtaggcgtgggaaatttcctggaaattgcgggtagtgtacacccggaccacatcccccacgttcagccccatgttctccgccacgatggaggaaaccacagccttttcccccatgtccagctccgcattgccggccaccaccaggtgcttcaaatcttccagctgggcggcgttttccgtatcgatggcccggaaaaagcagggcctctgccgtccctgcacgtctaccagcgcgtagtcttctatcagggcatacgtggactggactccgggaacgtgcttgagcttctcgctcaattccatccagtccggaatcacctccctcacgccgaagtcattccggtagcacacctggacgtgcggggagtgcgcaaacaggttcccctggatttccttctggaggccgcccatgacggacagcacgacgataagcaccatcacccccagcgatacgcccagcaggcagatcagggtaatgatggaaaagaaagtccgcagcgggttcaaataccgcagcgccaggctcaggctgatgtaccggctcaataggttcttcatgaataacgcggcacaccttgcctgatagcggccccctttccaagcttaaaacatgttccggggaaggccgtccgctacttggcggcggcggcctgccattccgtgcacagccagcgggccatggaggcgatcaccttctcgcaggcgggagcggaatcctttgaatccatgacgaacacggagaccgccattttccgcccattgggaagaacgatgatgccgacgtcattgacggcggtgatcacgccctccggagtggtgaagcccgatccggtcttgtgcgccaccacataatcctgcggcaacttccctttcaggcgcgtagtccccgtagcgcagccggccatcatgtcccagagaagccgctgcgtgtccttgttcagtatcttaccctcgtcaaacgcgcgcagcagggcattcatggctgacggacggctcgagttggcgtactgcaattcatgattccgcagcatctcgtcttccgtaaaccggacgttgatgccgctgatgccccattccttcaaatccttctgcacggtctccgtcccgccgatgagggcaaacaggaggtcgcacgtgttgttgtcgctctcctgaacggtcacgcgcagcagttcctttaaagaaaaatcaccgccctgcggaaagcgctcccgcaggggactccacgtgtcttttaccaactgctccgggcgtatatggatgatctgttccagattcagggctccctggtccacccgcttgagcacggacagggccagcacgaatttgaagacgctctgcatgggataggcagtctcatcacctaccgccacggcctcccccgtgtccagcatcactgcggccatgcccacacgggctttcagggaatgagccagcttctgcacagcggcggaatcagccgcgggagacgcggccaccacgggcataacacccagagaaagagcgcaggagcacaccatgcagccacgcagaaaagaaccggtgaaagtcatgggcgccattctataccacgctcgcaaaaaccgcaacagcaatccatgcacttccccccttttttccgtcatccgcaagccgggcagaagccttgccacacgcctcccttcctgataagaagggaggcatgccacccgtcctttcagaaaccctcgtctggtgcgtcaccctgctgctgttcggcatggggctgatcggcacgcttattcccatgctccccggcatcattatcattgcggcagggtgcatctggcagggagtgatgggcagcaggcacctggcgtggtgggaatggaccgtcctggcgctgatggttgcgggcggcctggtcattgacaagctctccggaggcatgggggccaaaaaattcggcagcaccgccgccggcatctggggagccatcatcggcgccgtggtgggcggcatccttttcacccccatcgtgggccttctgttcatgccgttcctgggggcgctgctggcggaactcatctttgccagaaaagacatcatggccgccttcaaggcaggctccggcgcggcgctgggaatgctcaccgggctgctgctggaattcacctgcggcctgctcatcatcgcctggttctgctcctgctacttcctgttttgacgcaaaaaacaggccgcggcgctgccttgcgaaagcttccggcagaaaaaacagacgctttttcttccgctgaaaaaaaaccatttccctaacgtattcccttaaagaccactctacgtacttatccgggcgagttgccgcggactttcatttcccccatttttccggcttatggatgcacctattctgatacccgtcgccatgatggcaggcttcatcattcttggagtcattctttccatgggaaaatgctccttcctcatcgcaggctacaatatgatgagcaaggaacagaagaagcagtacgatgaacgcgcgctgtgccggttcatgggaaagctcatgtactgcctggccttcgccatgctgctgtggctcatcagcattatcctccagaattccgtgctcctgtccgtctccctgtgccttctggtgggcagcatagcgtttgcagtcatttatgccggtaccggaagccggtttaaaaaatagcggctttttacatcaacctcctcttttacgggacacccatcctctctcatgactgtctctacaaccttgaaatatttcttcctcccctgccttcttgcggcggccgtccctctccgggccgctcccgcccccatgcaggccacttccaccgaacctgcacggatctggacggatggctacggcacgggcaacggaaggctgggcattctttcttttggcgtttttccgaaggaaatcgtcgttttcaatgaaggaagcatcttcgcgaagaagaatttccagatgaaggaaggcgccgcggaggccctggacaaggcgcgcgaactttgcaaggaaggaaaataccggagcgcggaccaggtgttccggaaggatatccttccccccggcagcatcgcgggggattaccagcagggaggtctcctccaggtggaattccaggggcttcccgccgctgcctcctaccggcgcacgctggacatgcagcggggcaaggcttccacccgcgttcaattcggcacgggagaattgtccacggaaatcctggcggctccgtccagcgattgcgccgcttaccgcatcacctgcacccttccggccgggtgccacgttgcgctggacttgcagcatccggacccgtccgcccggattgacgcacggcccgatggctgggtcctgacgggacagggaagcaacgggggcacccggtttgaaaacagggtggtcatcctggctcccggcgccgccatatcccgcaaggggaaaacggtcgttctggattccgcgcgggaagtgctggtgctttcctccacctccacggattacaatatccggaagccggaagagcccctgacccattccctggcagacaagaacaggcaaattctggcgaaggcacagaaaaaaggctggaaaaaactggcggcggaaacggaagattatttttcacgtctcatgatgcgctgccaggtggacctgggggattcccctcccgaggtttccgccatgaccacccctgagcggctggaacgggtcaaacaaggggaaaaggatccggaccttctggaacagcttttccagttcggccgcttttgcacgattgtccacaccaggccggggcagcttccctgcggcttgcagggattgtggaatccggagctgcgggcggcgtggatgggctgctatttcctgaacatcaacagccagatgaaccagtggccctcctatgccaccggcctgggggaattccagcagccctatcttgaattcgtccgcagcctgcgccctcatggagaggaatttgcgcgcttcatcaaacgggacggattctgcttcggccattacacggactgctggaaacgcacctatttttcaggaaataacccggaatggggggccagcctcatgaacggggcgtgggcgtgcgcccacctggtggacagctaccgcttcaccggagacagggaagacctgaagaagtccctgcccattctggaatccaacgcgcgtttcatcatgtcctggtttgaggaggacgatcaggggcattacctttccggccccggcgtctccccggaaaccggattttacgcgccggacggcacaggccccaacgtgctttcctacgtttccaacgggacttctcatgaccagcttctgggcagggagtccctccgcaattacatttacgcctgcggagagctgggcatacggacgcctactctggttaaagccgttcaattcctcaaaaagattccccagcctgccattggctccgacgggagggtgctggaatggaggcagccttttgaagaaatgcagaagggccatcgccatatcagccatctttacggcttgtttcccggcacggaatgggacgtgctcaatacgcctgaatatgccgccgccgtgcgcaagtccgccgatttccggcgcaagtacgcggacaaggggaacaacggcatcaggaccggctggagcaccgcatggctcatcaacctttatgccgcccttggcgacggaaacgccgcggaggacaggatgtacgccatgctgaggcattacatcaattccaaccttttcgacctgcatcccccgttccagatcgacggcaacttcggctttgcctccggcgtggcccagtgcctgattcagagccagatcacgcaggacggcttccaggttatcctgctggctccggccctggcggacgattggaagaagggttccgccacggggctgcgcacccggggagggctgaaggtggacctgtcctggcaaaacggcagggtgcaggccacagccaccgccacccgtcccggcaggttccggttcatgcaccagggcaggaaaaaggatctggccatgaaaaagggggaaacggcgcggcttgattttccgccgcttccccactagcattccttcctctccccaccctccaactcccccatgaatgtctcatccagaactctcaagtacgggctgctcaccgcggcggcctgcgtcgccctcggctcctgctccaagcttttttccccctgcggaagcggagaaattccggacacggaccagacggaaacactcctgaaagcacacgtgttccatctggcggattccatcggggaacgcaacgtctacaaacccggcaccatggagcgatccgcccgctacattgaaaaaaccctggcggacatgggctatgccgtcacgcgccaggccgtgaacattccgccctccggggaattcggcgccgtgaaggacaggacggcgtacaacctcatcgccaccaaaaagggaacatccctccgccccagaatgctcatcgtgggcgcgcattacgataccaaggtaggcatggacaactggcacgaccacggtcccgccagacccgcccgtaccggaacgccgggcgccaatgacaacgcttccggcgtggccgccctgctggaaacggcgcgcgccctgacggccactcccaccctgcacgacgtgtgcctggtggcttatgccaatgaagagccgcccttttaccagacgccctccatgggcagcgtggtgcacgccaaatccgtcgcacgccatccgggcaaggacagaatcatcggcatgattgccctggaaacgctgggctgctattccccgcgggtgaacaaaaaacgccagtcagccgtggttgccggattggccgggctgccggaccgctgcgactacgtggccttcatgtccaccaacacgggccgcaagctggcccgctcctgcgcggaggaatttgccgctttgagccgctttccggtccgttccgccgtgttcccgtattacacccgcggcgtttcctggtccgacgactggggatacatgaaggagggcattccctcctttgccgccacggacacggccttcctccgctgcgacgactaccatgaaaccagcgacacggctgaaaagctggattatccccagtttgcggaagtggtgcagggcctttcccaactcgtcatctcactcgccaataaaccatgagcatgaagcttgccttcctccttcccgcccttttcctggccttccctcacggccacgccggagccgcgccgtttgaaccgtccgtgctggaggccctccagccgcccgcggaacacggagcctttcattccgggtggatttccctggggctcaaggcggcggacctggaggagaaacaagtatcccccggacatattacggacgtgggggaagcgcagatgcagctctactttcccgccggatggaagccgcaggacaggcgcgcggccctgtgcatttttccgggcgggggctatgccatccaggccattgaaaaggaaggcggccatatcgcccgctgggcggcggagcacggcatggtgggcgtcgtcgtaaagtaccgcgtttccgggagcaatgatgccgtcggcaggtttcccggccctctgctggacgcccggcaggctctgcgcgtaacgcgccggcatgcctccgcgctgggggttgacccgcaccgcatcggcgtcatgggcttttccgcaggcggccatctggctgccatggcttccacgctctggaaccgccccctgccggaagaagcggaaaacccgctgaaaagcgtttccgcccggccggatttctccctgctcatctaccccgtcatcaccatggaccccaaaaccacccacgggggcacccgcagcaggattctggggcctgcccccggcgcggatctggcggagctgtgttccgcggaacggcaggtgacgccgcagacgccgcccgtgttcctcgtccacgcgctggacgacggcgtagccagcgccaacagcaggctgatggaacaggcctgccgggaaaagggcgttccctccagcctgcatttttatccctccggagggcatgggtacggcatggagaagcgcggccagcccacggacaaatggccggaggccgcggaacaatggctcgcggaacggggaattctcccctccccggctcctgcctgcgggaatgcgccttccggtgcgggcaccccccccggaacacggcgggaatgaatgcgctaggccctgatttgtgccgcaccgcagggttgaccggaaacgggcccggtgctacctttttcgggcatgagtgcgcccgaaaagaattataaagacaccatcctgttgccggagaccggcttccccatgagaggggacctgacgaaaaacgaaccagtacgcctgaaaaagtgggaagacaccgggctgtacgaacgaattttgtcccgcaggatagaacagggcgcaccccgtttcctccttcacgacggacctccctttgccaacggagacgtgcacatgggcactgccctgaacaagattctcaaggacctcgtcctgaagtccaagaccatggccggctacgccgccccctacgttccgggctgggactgccacggcctccccatcgaattcaaggtggtgcagaaggcccgtgacctggacgcggctgaaatccgccgccgctgcgcggaatttgccgaaggcttcattgacatccaacggacttccttccgccgcctgggcgttttcggtgactgggagcatccctacctgaccatgaagccggcgtatgaagccaacattctgcgcgtgttcgccaagctggtggaagacggcgcggtctaccagagccgcaagcccgtccagtggtcctacggggcctataccgcgctggcggaagcggaaatcgactacaaggagaagatcagctcctccgtgttcgtgcgcttccctctgctggacaatcccctggacctgaaggcctccatggtgatctggaccactaccccgtggacattgcctgccaacgtgggcatcgccctgcatccgcgcttcacgtatgtggccggcaagttcatgaaggacggccagacggaaaccctcatcatcctgaaagacctgctggacgccttcgcgcagaagacgggctgggccctagcggaaaccatccgcgagttcaagggcgccgagctggaaaactgcgaggcccggcaccccttccttccccgcacgtcaaaaatcatcctggcggacttcgtgaccacggacaccggcaccggcgccgtgcacatcgctcccggccacggggcggacgactacaacgtaggccgccagtacggactgcccgtcctttcccccgtggacgacgacggcaagtacacggaagaagtgggcgttccctccctggtgggcaagcacgtctttgacgccaacaaggacatcatctccatgctggagaaggacgacaaccttttcggcgtggaggaataccgccaccagtacccgcactgctggcgttccaagacgcccatcatcttccgcgccgtggagcagttcttcatctccatggacaggctgcgaccgcaggccctggaagaaatagacaaggtgcagtggctgcccgcctggggccgcaaccgcatttacggcaccgtggaggcgcgcccggactggtgcatctcccgccagcgcacctggggcgtgcccctgcccgtcttctttgacgaagacggaaaggccgttctggacgccgccctggtccgcaaaatcgcggatatggtggaggcccacggctccaacatctggtttgagctttccgatgaagacctgtgcgaacgcctcggcctgccgaagacctggaagaagggcaaggatacgctggacgtctggatcgattccggctgttcccacatggccgtcatggacgcccgccccgggctggacgccccggcggacctgtacctggaagccacggaccagcaccgcggctggttccagagttccctgatgctttccgtcgcctggcgcggcaaggccccgtacaaggccgtgatgacccacggcttcgtggtggacaaggacaccgggaaaaagacctccaagtccgacgccaagagcggcaagcccattgacgccgcctactactacgacaagtacggcgcggacatcgtgcgcctgtgggccgcctccgtggactggcagaatgaagtccccttcggggaagacctcttcaagcaggtcacggagccctaccgacggctgcgcaacaccctgcgcatcctgctgggcaacatcagcgggtttgacttcgccacgcaggcggtcgccccggaacacatgcccatcctggaccgctggattctggaacgcctgaacgccgtcatcaaggaaacgctgaaagcctatgaagcctatgacttccgcaaggcgttcagcgtcatcaaccagttctgcaccagcgacctttccgccctgtacgtggacaccacgaaggaccgcctgtactgcgacgacgtcacctccgtgcgccgccgcgccacccagacggccatgaccatcgtcttcaaggccctgtgccgcctgctggcccctatcctggtcttcacggcggatgaagcctgggaatacgccgggtatgaaggcagcgtgcacgagcaggacttccccgcgccgatgccggagtacgacacccaggaggcctcctccgccatttcccgcctccaggaaatcaagtccgtcatccaggtagccattgaagagcaggtgaaggccaaggcgttctccaagaacaatgaggcctccatcaccctcaccgttcccacgaatgaaagcgaggacgtggtggcgctgctggaagaccgcgcctttgccacggaattcttcatcattgcagacctggacgtgaagagcggtccggagctggcggccaccgccgccaaaacggaacacgccatgtgcccgcgctgccgccggtatgaacccgcggcggacggcagcgacgtgtgcgaacgctgctcggaagtcctttcctgaactgaaaccattccccgatcttttatggatacccagacggaaaaggaacccggcccccataagaaaacgcctcccggctggctctggtggagcctgctgggcgtagggctgtatgtactggaccaggcaagcaagctgtggatcgtccaccgcttcccgctgaactacctgaacgagaaagtccacaagtacgcctacctgccggactttccgggcttccaccacgtcaatgcggacggcacgctggacttcgccacgaacgggcacataccggcggcggacatggcgcagttccaggacctgaacccgaacacggtggacgccctgaacaggctgagggagctggaacccatttccttcctggacggaacgatgaacatcacccgcgtgcacaacacgggcgtggccttcgggctgggcaacggaacggcatggtccagctacctgttcctggcgattcccgtgctcgccatcgtggccctggtcgtgctctaccggaaaaacttcttccatacggtatggctcaagctggcctatgtgctgctgctggccggggtggcgggcaacctgacggaccgcctgatgcagggcttcctgattccctacgaacagccgcacggcttcttcacgaagctcatgaacggctacgtggtggacttcattgacgtcaccattcccctcttcaactaccgctggcccgccttcaacgtggcggactcctgcatcttcgtggcggcgatcatcttcttcatcgccagcatcttctccgccaggaagaaagaggaaaaaccatcctgaaacgaccatgaccatccggaccattattctgtcaggactgctgctgtgcgggggcctcgcctccggcaaaaatgaactgtccttcaaggaaacggtggttccggtaaaggtggctccggaccaggacagcatcacggcctccttccccttcaccaatacctccggcgttcccgtcacgatcagcaaaatccatgtctcctgcgactgcaccaccgccggggcgaaagataacaagctgacgtacgctccgggggaatccggcgtcatcagcgccgtgatgaagaccggcaacttttccggcaccgtggacaaggacatgacggtgcacgccaacggctccgcctacaagctggtgatacgcgcgcaaatcccggacatcatccgaatggaaccccgcaagctggaatggaccaggggagaagcccctgcccccaagaccattaaaatcaccatctccaaggaactgcccgtcaacctgaccacggtggacctgaccggggacgcctttgactatgagcccgtgaccgtgaagaaaggcagggaatacaaaatcatcatcactcccagatctacggccaagccggccttcaacaccatctgggtgcgcacggattccaccgtgccgcgctacaagcgccagatggggttcctgaccatcaaggaaaactgaccttccccacatgagagacgccctttccaccgccctgaagctcctgctggccgtattcctgctggccgtgggcatcgccgcgctggacctgcgcgtcatccagccgttccgcacgccgccctgcaatccggagacgctggaggaggggcacgtgtgcctggcccaggtgctgaaggaatggccgggaaaagtcatctggatagacgccagaaaacaggacgactttgaacgccacactatcacgcaggcccccgtctaccccatccgtccggcggacgccaattaccaggaactcctggccaacgccatggaagccctgatgacggcggaagacaagggctgctgcatcgtcatcttttgcagcagggactgcacctccagcgcagccgtagccaatgaactgaaaaagccggaatacggcatccgcgcgcccatcttcattctggaagggggctgggacgaattgcgcaaagaaccttcactcgtaccatagccatgcttgacacagcaaccatccgcccgcagtttcccatcctggaaaccagcgtgcacggcaaaccgctcatttacctggacaatgcggccaccacgcagaagcccctagccgtcctggatgccacccggaattattatgaaacgcagaacgccaacgtgcaccgcggctcccactacctgagccagcttgccacggaggcgcatgaagagtcgcgggaaacggtggcccggttcatcaacgcgccggaaacggcggaagtcctgttcacctccggctgcaccatgggcatcaacctggcggcagacaccatcgctaggtccggcacggtcaagccgggggacgaagttatcctgaccgcctgtgagcaccactccaacatcgtcccctggcaaatgctctgcgaacgcacgggcgcggtcctcaaggtagtcccgctgactccgggccagacgctggatatggaggcctaccggaacctgctttccccccgcacccgcatcgtggccgtgggccacgtctccaacacgctcggaacaatcaatcccgtgcaggagatcaccgcgcttgccagggaaaacaggccggacaccattgtgctgattgacggcgcccaggccgtctcccacatgaacgtggacgttcaggaactgggatgcgacctgtacgccttttccggccacaagctgtatgctcccaccggcatcggcgcgctgtggggaaaaagggagctgctggaaaagctgccgccgtggatgggcggcggggagatgatcaaggaagtcacctttgaaaaaaccgtctacaacgacatccctttcaaatatgaggctgggacgcccaacattggcggagcggtaggtctggcggcggccatccgctacgtctccggactggggctggacaacatcgccgcccatgaacaaaaactgacggacatggccgtggaaggcctcaaggccataccgcgcctgaccgtgctggccccggacgtgccgcacagcgccgtggtctccgtcctggcggaaggcatccaccattacgacctgggcaccctgctggaccagatgggcattgccgtgcgcaccgggcaccattgctgccagcctctcatgtgcgccctgggaactacgggaaccacccgcgcctcctttgccctgtacaatacggaagaggaagttcagaccttcctcaagtccatgaaccgggctctggacatgctctcctgacctctccgcccccttctctccttgttcatcatgaaaacggcttccgcccttcttctaggccttctcatgggcctttccggctgttccctgcaccaccagcagcaggaaagggcgtacgcccattaccaggatgacgccgtagccatccgggaagcccaggccgcatggctcatcctctcctctccccaccgcagcagggaatggccggaagccagaaaaaaatacaacgcatgcatccggaagctggcctcccacctgaaagaggccaaacgggagggcggcatgaatgagaagaagcgtcaaagcctccccttcatcattgaaaaatctccttacgccaaggacagcaacccctggttctacgaggccatcttcatgtccgacgaagtggaccccaccttccgcctgcgggaaagcgtaaccgtggagggaatgggcattcccctggcgggcctggcgccccagggcgtctcccggccccatgccaacgtgctcaaggacaacgggaacgtgcacacgctgacggccatcctggactttgaccgcatggtggacgggaagcccaccctccgcaccattccccgtctgatgaatgagcacgtcttcatcggcaaaaacaaggtgcgtcagcccctggcggccaacttctccgttcccatcgcccttttctggaagctttccgacgcggacggaacggaactgctgggcgcgttccgtcccaaaaaggccatcaatacgatggggctttatttttccgaaccctatgacccccggaaaattcccgtggtcttcacccacggcctgatgtccggccccgccacctttgccaacctgaccaaccgccttctggtggatcccgtcatccgggaaaactaccagttctggttcttcggctatccgtccggcctggcctggaccattccggccagcaggcagcggaaggccctggaggaactcatgcaggaatacaatccccgcggcgactccagggaaatgaacaacatcgtcatggtggggcactccatgggcggcctcatcacccgcttcaacaactccaccaagccctggacgctgatgaagggcctctttgaacttcccccggaaacctttgcagacatgacgctggagaactggaaaaccgggctggaacccctgcactgtgacgagcccatgcttgaacagctccagaacaattttatcttctcccccgccaggggcgtcacgcgcatcgtgtacatggccaccccgcaccgcggctccacctttgcggacaactggatagggcggctgggccagcgcctgatcgacctcccggcggacatgctggaggaagtcacccgcatcgccaccctcagccgcggcatgttcctgctcaaccccctgcagctgaaggacgaactcaccagcatccgccagctttccccgaactcctccctggtcaagtacatgtcggagctgcgcggggacccgaacgttcccgtccattccatcatcggggacaggggcaggaacgatacgccccactcctccgacggcgtggtcaagtaccgctcctcccatctggactggagcgccagtgaaaaaatcgtcccgtccgggcacagcgtgcaggacgaccccgccgccgccgtggaactgcggcgcatcctccgggagcacctggccaaggtcaagggccgccaggcgctggaggaagcggacgcacgggccgccaccccggtatggcagtccaaccccgccccgcccatcatcctgaaaaggccgtaacagaaaccggagctgctcttccaaagaatcgtccgtaccctttgtctccggggaaaaggatttcttcattccacacagttcctccccttgcccgtgccggcaaacttaaacggactatacaggcaaattttaagaaaaatgtatatcgtctttcatcctattgtggattttttctaacaaatagataatattgatgtctgtaaaaggaaggtactgagcgtaataattattatattattttttgatggaaaaaatcgttatgtttcataggcaaacaaaaatttgcaaataaactttattgacactggctctggatcatgctactgggaaaatgatcatggaggattgctctcctctaatttcatcatcaatcccagttctttaatgccttatgaatactccaactacttcttctgccggcaccccttcttccatccccgcttaccgcaaatggtactttggctctacggccaaacccatgccgcgtggcatgcgcgcctctccggagcccgatccgctaccgttcgaggaaatccacgaacacgatgaaattaccgtgggaccgcccagtacgtcggcggatggacacagtgctcacggttactttaccattccggaaggagcggacggtaaaaagctctacggcacctgttcgctcttcctgggggtggacgactggggcagcctggaagtgaaggactccagcggcagcgtggtggcgcaggtggacctgaagaaagactcgcagacggcaggcaagcagggcggccataaataccacacggggaccggcggggcgcagctgccctccggctcctacatttgggaagtcaaccagaccaacatcgactacaagcctgaaaaagacaacgtctccatctgcaactatagcatcgacgtggtgccgacggagccgggaggcaaggaggagcccgagaagtgcccgtgcgagggagacacgtgtgataacagcggcggaacgccgccttccccgtcgctggcccggtcgggctccgcggtggggaatagcacgctgggaaactactcctccgcagggtgcagtgtgagtgcggaaagcacggccaccctgatgtactggtcctgcaacttcggaatgttccggggactgggagggattcctgcgggccttgtggaactgagggctgaggaaactgtctccggcctggaaagcccctcctcactggcctacaaccatccgttgaacagccgcctggacgtgcccgaagggggaattgtacccggagtgcgttttgatctggtgcagggagaccgggtgattgccatgcgctgctatatgaacgggtccgtgctgcccgttggcgtggacacgtcgggcggaggacgggcaacgctggacacggtggaaggacaatcctgcctccgctggatcgtggaagacggcagccaatacctcttctcggcggaaacaggaatgctcctctcctacaccaccaccgacaagcaggtcatctccaacgcgtcatcctacctggacgtcaagcatgccgaagacggctcgctgaggcaaatctggaacctgtgggacggcctgctcaacgtggaaaacgtcacctccacgggctacatcatcgcgctctacacgcctgggcaaatcaccggaacggacgaacagggattttatacggtcaccgggacaccctttaaaacattcaacctttccctttccgcggacggccacttcaccgtcacggaacaggcgccggctaggcagccctacgccgtcacctggtggaacgacggcctggcgtggaacatgcggcagggcacgggggaagacgccgtcacgaccatccgcacgcgcacggagctggaaccggaagactcggtctggcagctggtgacggaaatctccaaaggaggtatcgtggcagagcgcacctgctccatatatcaaacgacggacgtaggcgatctgctgctcactcaagtggaaggctatcaaagccaggaagcccagaccacgcaatacgcctacgaccagtgcggacggctcaagacggaaactgccccggacggcagccaaattcattacgcgtatgacctctacggacgcctgctctcccgcgacgaaccgtgggcggaaagcggcaggcgcatcacgcgctacacctatgcctattcgggagaagccgacttcaacgacgaacccgccacggaaacggtagacctgcttccgctggaaggacacgtcaagacgctgaccaccattgcctacaagtacacgacggccaatcacgtcaaaaggacggaaaagcgggtcaccggactgggagtaacgggcacgcgcctgacggccacggaacaatggctggccggcgcgcccgacgtctatgcccgcggacgcacccggatgacccgggacctcaccggcgtgcaaacctggcacgactacgcggcaacgacggagcacggcgccctctacacggaaacgttggaaacgcgcgtcaacggggaaaccgtgccgggacagagcacgcgcaccacgacctggatcacggcggaagggcagcgcgtcagggaagaaagctacgccctgctcaccggcggggaatgggcgctcacggacagcgcctcctatgaatttgacacgcagaacaggtgggtgaagcggacggcgggcaatggccgaataacggagcgcgagctgatgtgcgacgggcgcctgttgtgggacattgatgaaaatggtgtaagaatggactatgcctacgacacggcgcgccaactggtggaaaccacgcgttccgccgtaatggacggggaaaccgtcatcacgccggaaaccatcaccacctacaccctggatgcggcggggcgcatcctctctacgcgccgggatacgggggccatgacgaccagcgaaagctcggagtacgacttgctggggaggataacttcctctacggacgtcctgggacgagtcaccacctacgcctacagcgaagacggtctgacgacgacgcaaaccactccctccggagccacgttcgtcacgcgcaacgcgccggacggaacggtcctggaagaatccggcacgggacagcggcatatcatctattccctcgacttggttgccgacggcgttcggaccttcacgaaagccgtctccggggaaacggaaaccgaactgcagcgcagcgtcgccaacggtgccggggaaattctgcgcacgggccggcccaacaccatcgggggagtcatttacacgaggaacacctataacgccaagggacagctgaccaaggaacagacagatgcggaaaccgcagctacgacgatggcgccgaccctgtgggaatacgacgacttcggcaataaggtcaaggaaacctggaagcttgccgatccggccaccgtgtccaactcgcgcatcaccacgtggagctatggcgtggaacaggcgcaggacggcgtctaccgcgtcgtcacggcgactaggaacaacggccaagggactacctatggcgaaacgcagaagacgctggtttcctccctctcgtccacgctggaaagcaaaaccgtcttcatcggtcccagaggaaatatatccacacagtggagcgaatacggaacaggcgccctgcggacgcaaaaaagcagcatccccacttccaatgtcacggccaccgcgacggtcatcgacgactttactaccacgcagacggaccacgcgggcattacttccacgcagacccgagcctatgcggaaaccggcatcatctacactaacacggacggacggggcaacaccattacgacacgtaccgacatcgccgggcgcactgtttccgttaccgacgcggcgggcaacacggcttctaccgcctacgatccctggtttgaccagccttccgccgtcaccaacgccctcgggaaaacgacatgctacaactacgatctccggggccgcaatacggcgcaatggggaacgggcgcccagcccctgctcttcggctacgacgaagccgacagaatggtcagccttaccaccttccgggaggacgcgggcgacatcaccaccgaccccacgggacgcacggacggagacgtcaccacctggagctatgatgaagccacggggctgttggcgcgtaaaacctacgcggacggaacgcatgaggacaccgcctacaatgccctgaacctcagatccacgctcacagacgcgcgcggggtggtcaccacctggggctacaatctgaagaaaggggtcaacacctccgtctcctacagcgactccacgcccggcatccagtacgcctacaactgcctcaaccagctgacccaggtgacggacgcctcaggctctcgcaccatcacttacactccctacaacgaaccggacaccgatagcatcaccataggaggcgcctcctgccagctccaggaaaactacgatgcctacggccggtcctccggctataccctgaaacagggaaccgacgtcctccaggaagcaagccagggctatgaagccaacgggaggcttgccggcgccggaatcgtgcacggaggagaagaacaaaccttcgcctacggctacctggcgggaagcagcctgccctccagcctcgcgatgcccaacggcatcgtccgggaacttgcctatgaagaacaccgtgacctggcagtggccataagctgccgtctggggggaaccgcgctggtctcccgcagccagagctacgacgcattgggacgcccggtcacccgcacccagcagcggggaaccgaagcaactcgtactgacagcttcagctacaacggcagaaacgaactcaccggggctactctgggaacagccccctacggttacagctacgacaacatcggcaaccgcaagacggcgcgggaactggccgaggaactttcctacgcggccaacaacctcaaccagtacacaagcatcgaagaaaaagcggaggcgccttttgtgccgacgtacgacgcctcgggcaaccagaccctcatcaaaacctcgacgggcatttggacagtagtctacaacgcggccaaccgcgcggtgagcttcaccagccagggcggcagtacggtggtggaatgcggctacgactaccagggacgccgctacatgaagaaggtcaccgtcaacggaacggtcgtcagccatgaacgctacctgtaccgtggctacctgcaactagcggcgttggacatgctggacaaccggaacgtgcttcggacactgctgtgggatccactggaaccggtggcaacgcgtcccctggccctggtgcaggaaaatgccctttactgctatggagttgactttaacaagaacgtcacggaggtgttcgctggagagggagctattgcggcaacttatgactactcgccatacggacaggttgtttccacgggggacctcgtccagccggtgcagtggtccagcgagatgaacgatgtagaactcgccctggtctattacaactatcgttattacaatcccgcagacggcaggtggatcaatcgtgaccccatcgctgaagaaggcggatggaatttgtacgggtttatagaaaatgttgtaataaacaaatatgacggtttagggttaaaaaagggattcacaaaaacaggcgatccgtgtccgaaatgttgtaaaggatgtgaaagatcgcaggaaaggccagttattaaagatgcaggaacaaaaggaattgatgttaaggcatcagttgaaagtcctatgttcacatccaaatgcgaacataatggtacatgtaatgaaaattgttgctatgtagtttatacttggtttgattgctataacaaaacatgttatagtcaaacaggtgatactttcaatagaaaagtccaacctttgagaggagtaggaagagctcggagtgcattaggagtaagcgttcaagcctataaatggtgttcctgtaataagggaaaatgggaatgccataatgtattgttgttaagtaatacattattatatcaagtagataatccgaataatccgaaagaatggattcttataattcctaataaaaaataattaataactatgaataaaatattttatgtagcttttatattgttatgtacgcactgttctgacattaaacaacaaaatgttgagaaaaacatttttagtgaattaagtgataaggcgcattttgatcttatttatacagaatggtttatgtaccaagcaggatcccttcgcaatctcgttccaggaaaatataatttctctaaatttgatgttactccaaacgatatcatcgaatttcagaaattagaaattaaaaacaagtatagtcagaaaaatgattcacaaagaaagaaacaaatagagacttggatagaagatcaaagaaatgcaattgctgcattaaatatggagaagcatataaaattagaaaaaacagatattcagaatttaataaatatgcttaatgaacaggcgaaatatgtcaataagctgtatttacaaatgtcagtactggattttcctgagaaaataaatactccaacttatgattgcgctggggcatccgactacccgcacccagtagcggaaaaacgaagtagtccatagcgacagcttcagctacaacagcaggaacgaactcaccggagcttctctaggcacgacgccctatgcctcagctagacaacatcgtcaaccgcaagacggtgtagaaactggccgaagaactcatctacgcggtcaacgaactcaagcacagtacactagcatcaccctccactctggatctggatcaaccctttgttcccgactataacgcttcggccaaccagacgctgattagaacttcaacgggcatctggaccacagtatacaatgaagctaaccgtgcggtgagcttcatcagccaggacggcagtacggtggtggaatgcggctacgactaccgagggcgccgttacatgaagaaagtaactgacagagttgaaacgatatctatgaatcgtacatcgtatttggtgtttttgatcaggcaataggcaagtttatacaagaattatcgacaacgttaaaatgtatgattcttcgtgataggcaaaaaatactcatcaagaaagagatcaacggctccagtgcctggagacatccaatttctccataacatcttccttacataccctgcatgacctgccccctcccctcgggatcaggcatccgcagtcgcggaggcctgggaacgctcccgcctctccccctcatctactccaactctgagaacgaacgcttcctcattgaaatttcaggaaaaaccctgcgcgtcttctctctcgcctccgcgaggaattagtccaatttgacgcggaattcggggaggaaaaggctctgcacaggaagcgagtaaataagcttctcctcttcatccatccggcataccccgcatgttctgaaacgcgaaaactatcaaaggaagttcgaaccctgctccttcaaggtcccttgacgccaccccggccaccgaagagtttctgaggcgttcaatgataagattaacttgaggctgcaaaaattgaagctttatctttcacacccagatttacgatgtactgggacgatcgggttccctatcatgcagaaaaggccgtaatgcccgcgcttatttcccgaaattcccccgttccgccccatgcatgacatcctatggctgctcctgacgtccctgctgaccggctggatgatgttcaggacaaggaaggaagaacatttttccggtaagaaacaggttcaggaaatcgttaacaaatacaaactccttgctgagtttgccggctccctattcctcattctgttatgcctgttgctcgcatccgccgttttcctgtcaaacggatgtccggaaacggctcttttcctagccaccctgtacatggtggctttaacaaccgccacagttatccacctgctttgccgcatccgcaagaattgggatgaacatgatttttacatggccatggccaatcggacaggaatgtctctcaggcgcctgaagcaactgaaatttttcctgctgattgcggcttgctccggactggtttgttcagccttccgggttttgcccagcaggtaaggaaaaagttatttcccggccacggaatgaagaggaaacaacccttcctgaaaacggagggggcatccggcttttccaacaaacttccccgtcaggaaaaaccattgcgccagcggaaggaacaggcccgtcaaccgtatggatacggaaagaacggcccctcgggacgccttcttcaaaggagagcgtccgccccgcccggaaaaggccgttccggcccggcacgagcggtttccgttcagcgtcaggacatcccgccagcaaaatatgcccgcttatagagttgcttccggcaaggattttaaggtagactgtttgccgatactattccacctcccttttccatgcctgccgacgattccctttccatggaccagatttccgccctcttcccccagctggaaaacatccagcttgtcggggccaaaggcccccagcaaattttcaccgccaccctgaaatccaatttcgctcccgtcatgctgcgggtggttcccacggaggaagccggagtcttcggctgggatccggaattcatcgtccgctccctcaccattgtggaacaggcgcaccagggccttctgcgcgtttacgaagtgggacaggcaggaccgttcaccttcatcatttccgaacactccccctatccgcgcctggcggacctggaaaccctcccccagatatccccccaggcggcgctcaacctggtgcggaacatggcggaaggcctgctgacgctgcaccggaaaaacatctttcacggcggcatcacgcccaaactgatttccctgcgcgcggacggcggagacgccctgctgctgcccatcaacatttatcccgcgcagcccccggtagacatgggggacttcgcctctccggaatgggtcaccggggcggaagccgccttcacgccgggcatggacatttacgccctggggctgacgctctacatcctgctgacccgcaagacgccgatggaagcgggcttcgccatgccctccacactgatcaagtgcagcgacgccgtggacgccgtggtctcccgggccatcaatccggacacccgcgaacgctaccggaacctgggggactttatcacggacctggacaaggccatcgccagccccacgggaagaaacgcggcagccattcctccccggccgtcctcaacgcccgtccccgccatgaatatgcagaaagggcagaccaatgtttactactaccttatcccggccctgatcgtaggcattgtgctgacctacacctgcatcctgtacaagaaggacgtcgtcagaatgcgcaatgactacaacgaacaggtgcagaaggaaaacaacgcgaaggcggatgaggcgagaaaagcgaacagggaagcgcgccgccatgctccggcaacgcctgcgccctctgccccggccgtcgcggaaaacaccactccggcccctgcggttcccgcacctgccccgctcccgcatccggaacccgtgcctgcagctcccaaaccctccgccgaacccggcaaagtcaactggagccttcagcccggcgtcaaggtgcgccagagctccaaccgcaacatgctgggcgcctacggtccggaaaaggccgtggacggcaataccagctccgagctttccgacgtttccatcagcgccaccggcgtggcggaaggaaaaaccgcctggttcggcatcgacttcggcaaggagaccaaccgcaccatagaaaaagtggttatttacacgccagccaacctgactctgctgggcaccatggaggaattcaaggtgattctgtacgacaatgacaagaacgtgctggcggaaaaaaccttcaacaccacaccctcggaaaaatccaccaacgtcaccacctggaagctggaagctccggtcaaggcgcgcgccctgcgcgtggaatccaccgatccggcccatccgctggcgctgacggaagtggaggcatacggcccggaagaagcggcggaaacaccggcccccgcacctgcggaagaataatgcctgcggaaccgttttcagccggaattccgcccctccggaagctcggcgtcctcttgttcctcctgtgcctgtttgccctgacgctggccgggggcaccttctatctgcttttccacgatcttcccctgattcagcaagccatctcggaaacgctggctcaaaccatgaaggaactccaggaaggggaccgcgcctccctttccctctcccttgccagggcggaggcaggctccgccgctccgtttacgctggacggcggcctgttttacctgtccatggccgggctggtggtctgctggctgatgctggtttaccggctggcgcagaatgcggaaacggtgaagaagggagccatgcgcgcctctcccctgctctgcgtcctttccttcttcctccccgtgggcaatatctggatgccccttcaagccatgctggacgtcaacaaggccctctccttccccggcccttcacgcggaaaaggctggatatggctggcctgggccgtcagcgtgccgggttccctgctcatcttcctgtatacgctgttccagcccctgttccatttctcggagacgctccgggcatgggcggaagaaagcccggaaaacgtgcttgcgctggaccgggagctggaagccctgctgaacggcatggtgcgccccgtcatcatgtacaacggaacggccttcctggtgagcctggcaagttccgtgctgatgatgctccacttctatttcctgcaaaagaggctggccaaccgcctgccttcctgattagctccctccccccggcaaagccccgccggaaggaacggaaaagccggaggacttgttccatcccgttcctttttcttgccggctttctttcagcctctctccccctttccggaactttcaccgggaaaaaccgtgttgccctcacaggggggttcacgaaaattttttcacgccttcctttcccgtccggccccttcttcctccggggtggaataaaaccttccgggcataaaaaacccggcctcgcctcacggcgggccgggccagcaaaaatagcaatttttccgattaccggttggcggacttcacgatcatggcgtccttgccgatacggccgcgcaggtagtgaagcttggcacggcggactttgcctcggttcacgacttcaatcttggcgatgcggggggtgtgcagggggaacacgcgctccacgccttcaccgtaggaaatcttgcggaccgtgaaagcttcattgatgccggaaccgcgcttggcgatcacgatgccctggaaaatctggatacgttccttgccgccttcaataacacgagtgtgaaccttgatggtatcacctacgttaaatggggtcacatccgccttgagttgctcttgctcgattttgttgataatgttcatcttgtgttatctattgctggtgaatatcagtaaaaggaaaacttacgggacgcagaatatgggccataatcccctaaaaggcaatccaaatttgccgtacggccttaattttattttttaggcgggggcggcggcggagctatccttgcatgccactcctccagcgccgggagaaaggcggaggaagacatgagggcgcggacgctgtccatccgcagcaggaaggccttgtccccgccctgggcgcggtccgccagcagggactccagcagaagacgggcgcgggtgcgggcgtccgacgcgccgtcaagggcggagaaaaccagctccccggcccgtgctggctccttccggtacaggtattccagcgccagcgcttcataaaggcaggaggagggtgccttccgggcggattccagcaggcgcgcggaacggtcccgccagcggtccccgaactgtacagaggaagcccaccagccctggaaatagcggtcctcttccgtcggcttcacgtccatgttcttcatgcgggcgtacggacggtagagggggtccccgaacaccaccccctgccaggacagtacgggcatgctcatccaggaggcttccgccacggtatagccgtccagcaggcggtccgcaaaaatgtcaaagcggtgacacgcgcccaggaacggttcatacacgttccccaccgtcacgtccgcccccttttccagcagggcggaactccaccccctgccgggaatcttgaaatcggaggcgctgaaggaatgcaggtgcatggcgaccgctccgggccggaaacggaaggttgggtccgtaaacggaccgttcgcattcccggtgtaccagccgcagtaaagcgccgtgtcccggctcagcggaaatttctccggaagagtctggggccagtcatccaggtaaacggggattcccgcttcccgcacgcggcggaacacggcgtccagccactggtccccctgggcgtaggggccgccccggtccaccaccgcccacccccacaggcccttcttctccacctccgcaggttccgtgaccagccgcaggcaggtatccgccgtcagaccgtccaggcggcacaccaggaacgtgggcaggccggagcccacaaaatcctccttcctgtcaaaataggggtttcctacccaggccttcctctcataaccgtccaccgccagcagcgccagttcggaatccacggcggcgcggtccgtctgcatctggttgatatccttcccgggagggggaacgggcgcttcatgccgtatcttcattggcaggtccgccatcagcaccagcgcaaaaatcttccggtccatcatgggggcggaggcaatgccggacggcacccaccaccgctgctcctgcgccgtccgcagcaggggcgcacggatcaggtcttcatactccttccgggaaatctcgttggccgaggggcagtccagggaaaccaggttcccttccggcacgccgcgcacccgcgcatactccctggccatgcggcggctcagctcggattttccgttgtaaaccacggccacatgggcgggcagcagctcataggcacacgcggcggaaaaccacgacgccagcaggaacaatacggctaatcccctcttgaacatgcccctaccatacctcatcttccggggcaatcaagcaggtgaaacggagcgggcgcgatttcgccatttttccgcttttcgcttcacatctaaaaaaaatccgctttaatggctcctgatgtattgcaggcttccacctgcattccctacaaccatcatacgcatatgattcaacaaattgaccatatcggcatcgccgtcaagagccttgacgccaccgttccctactaccgtgatgcgctcggactcggagagccccacattgaggaagtgcccacgcaaaaggtgcgcgtcgccatgtttgacgttgccggagtccacatcgaactgctcgaacccacctctccggaaagcgccatcgccaaggccatcgagaagaaaggggaaggcatccaccacatcgctttcaagaccaacgacattgctgacaacatctcccaggccaaggaagccggccttaccgtgctgaacgacccgcccgtccccggcgcgcacaatacgcaggtcaccttcctgcatcccaagtgcaccttcggcgtgctgaccgaattctgccagcaccccggcggttgcggatgcggcaagtaacattctccgaatccaccataccactataccaatggctattgatcccaaattgattgacgatctgaacagccgccgcaagaaggtcatcctcagcggcggtcaggaaaagatcgacaagagacacgaaaagggcgaaatgacggcccgcgaccgcatggggtacctctttgaagaaggcaccttctcggaaatcggcatgcatgtgcgccacaactgccacaacttcggcatgggcaagaaggaaatccccggcgacggcgtcgtttccggctttggcctcgtgaacggccgtccggtcgcctgcgcggcctccgacttcctggcccagggcggctccctcggctacatgcacgccatgaagattgcggacgcccagaagtacgccctgaaagccggcatcccaatggtgacggtgaacgactccggcggcgcgcgcctccaggaaggcgtggcggccctgtccggctacgcccaggtgttctacaacaacgtgctggcttccggcgtggttccgcagatatccatgatcctggggccctgcgcaggcggcgcggcctattcccccgccctgacggacttcatcatcatgcgcaattccggcaacgccggcatgtacatcaccggtcccaaggtgattgaacaggtcacgtatgaaaagtgcacgatggacgacatcggctccgcggccatccacgcctccgtgtccggcaacgtccacttcgtggcggacagcgacgcgcacgccctggacatcctgaagaggctcctttccttccttcccgccaacaacgcggaagaaccgccccacaagctggacaccccgcttgacctgagcgcggacgaaggcatgagcgacctgattcccggcgacaaccgcacgcccctggacgtccagcccatcatcagccgcctggtggatgacggggatttcctggaagtgcacaaggacttcgccaagaacgtcgtcgtcggcttcggccgggtctgcggcgtggtggtcggcatcatcgccaaccagcccaacgtgaaggccggctgcctggacatcgactcctccgacaaggccgcccgcttcatccgcttctgcaacgcgttcaacatcccattggtgaacctggtggacgtgcccggcttcctgcccggcaagaaccaggaacgcggcggcatcatccgccacggcgccaagctcatcttcgcctactcccaggccacggtgcccaaggtcaccctgatcatgcgcaaagcctacggcggcgcctatatcgccatgtgctgcaaggacctgggcgctgacgccgttttcgcctggcccggcgcggaaatcgccgtgatgggcgcggaaggcgctgttccggtgctttacggccgcgagctgaaagccgtggaagaccccgcggaaaaggccaagcgccagggagaacttctggaagaataccgggaggccttctacaacccgtacgtggcggccggcatgggccagatcacggaagtcatcaatccggaagaaacccgcgccaagatcgccttcgcactgcgcaccctcctgaacaagaaggaagtgcgtccggccaagaagcacggcaacattccgctctaacatccatcttaacggattcatatgttacttacgacactcgcctttgcgcagggcatggccaacatcatggagaatctggactaccagatcgtcggcatcctggtggtcatgatgtgcctgggtggcctggccgtcattctgaccatcagcggctccattgccgcttccatccagaacaaggccaaagccaaggccgcagcggcctccgccgctcccgctcctgtgcctgccgccgcccctgcggcagcaggcaagccgggcatgactccggaaatgctcgccatcctctccgcagccgtggactccgccatgacggagctcacgccggaaatggtggccgtcatctccgccgccgtggacgcaggcctggacggcatgagccaccgcatcgtggaaatcaagcaatccccgggctccggctatgcggccgcaggcagggcggaaatcttcgcctcccaccgcatccggcccagtcattgaaccactgcattattcacccttacccccgcccccggcgggaatcatttaacttaatattccataccatacattattatgaagaaacttcgcatcaccgtagacggcaaggtatttgacgtatccgtagaactcctggaccaggtctcctccactacctccgccccggctccggcccccgttgcagccccggctcccgcacccgcagcctccgcccctgtcgcggcgcccgctccggctcccacgcccgcccccgccccggccgccgccggcgcaggagacgtgcccagcccgctcgccggcaaagtcgtttccctggacgttgcccccggcaccgccgtgaaggccggtgaccagatcctgacgctggaagccatgaagatgaacaccatcatttacgctcccgcctccggcacgctcaccgctttctgcgtaagcgcgggcgacacggttcaggaaggacaggcgctggccaagattggttaatcccggcgggagccgtccggtccccctaacacaggtccggactccgactcagactaaaaaccgctacaataattattccatatgagtctttttgattcattaatcacctttttacaggggatgggcatcttctccctatcatggcaaatggtagggatgtggggcattgccgttcttctcctgtacctgggtgtagccaagcagtacgaacctcttctgatggttccaattgcctttggcgcattaattgccaacattccggacaacggaatgctcatcacccagctgaaccagcaggtcatctcctctaataaggcgggggaagtgaccgccacgtccctcaacaacgtgggctacctgcgcgttcacgtggccccgctccagcaggcccccgtcaaggtgccggccaacctgaccacgcctgaagcgcgcgcccagtatctggcaaacatggaacagcccatgcaggtttaccccggcagcccgctgaccgtctcccagatcaagcccgtgcgggaatcccaggaaaaagccaaggctgacgccgcccttctgggggacgacagcctgacggtggaccccaacctgaaggacttccacaacgtgacggaagcggacgccaacgatccggtgtacctgctcacgaacggtggagtcaccaccgttctgcgccagaagggagtcaactactttgacacggaaggtaaccaggttccggtgaatctggaaacgcagaagctggaacccctggtggtctccgccgcaggcaagtacgtggccgtgggccagcacacccaggaattactggtcacctccatccatgggggtctgtacgactggatcgggctgggcatcaaggctgaaatcttcccgcccatcatcttcctgggcgtgggagccctgacggacttcggcccgctgctcgccgcaccgcgcacccttcttctgggtgcagcggcccaggtgggcgtggccgccacgttcttcatggccctgttcatgggcttcacgcccaatgaatccgcctccatcggcatcatcggcggcgctgacggccccacctccatcttcctgacgatgaagctggccccacacctgctgggcgccgtggccgtggccgcgtatacgtacatggccctggttccgctgatacagccgcccatcatggcgctgctgaccacgaagaaggagcgggtcatccgcatgaaatccctgcgaacggtcagcaagagtgaaaaactgttcttcgccgtgctggtcaccattgtcaccatcctgctgattccggacgcctctccgctgatcggcatgctgatgctgggcaacttcctgcgcgagtgcaaggtgacggaacgcctggtgcaggcctcccagaatgaaatcatcaacatcgtcaccatcttcctggggacctccgtgggcctgacgatgcaaggtgaccgcttcctgcagaaggaaacgctgctgatcattctgctgggcattgtcgccttcggcgtagccaccgcgggcggcgtgattgccgccaagctcatgaacctcatctggcgcaagaatccggtcaaccccctgatcggttccgcaggcgtctccgccgttccgatggcggcccgcgtctcccacaatgtgggccagaagtacgatccctccaactaccttctcatgcacgccatgggaccgaacgttgcgggcgtgatcggcaccgcagtcatcgcaggctactacatcgccactctggcgagataacctgatttgaaattattccaggcctcggcccatcccatgaattccaccgccccatcccccactcctccagaggaggaaggaccatgcggcgactggacctatcatgaatgggccgaggcttcttccaccaatgacctggcccgttccctgcccccccgccacattgccgtctgccgcgtgcagaaaagcggccgcggcaggttcaaccgcaaatgggtaggggaggaaggcggcctgtggtcctccttcaccgttcccctggatactgcggccggcgtacactggggccatctgcccctggttgcagggctggccctgctcaacatgctccgcagcatgggcattgccaacgcgcgcctgcgctggcccaacgacgtcctcataggaaaatccaaactggcgggcattcttgtggagcgcccctccgcgcacatggccgtcatcggcatgggcatcaacattttcaatgacgtggcctctatagccggagaaatcaaggaccctcccgcaaggctcgcggatcttgttcaggactgcccctcactgcatgacgtcatggcttccctcggcaggcatttggaccaggttttttctacctttgcccacggcggcatccccacccttcaggaggggctggcgcaagcatgggccggggaaaggccggtttccatccttacggatgacgaaaccatccggggaatctttacggggattgacgatcagggcaatcctgtggtatcccttccgaccggttccctccggaccgttccggcacatctgatcaacaggcttgttgaagaacaagcctgaccgctccgttgacacggagtttctttctctttcatccaacaaaaatcactgacatgagttacaaggaactaacaccagaagaagcagcaagcctgattaaacacggccaccacattggcctgagcgggtttactcccgcagggacggccaaggctgtgacggctgaattggcaaaaattgcagaagcggaacacgctaaggggaaccccttccaggtgagcgtcttcaccggtgcttccacgggcgattcctgcgacggggttctttcccgcgccaaggctattcgctaccgcgccccctacaccaccaacgttgacttccgcaaggcggtgaacaatggggaaatcgcctacaacgacatccacctgtcccagatggcccaggaaatccgttacgggttcatgggcaaagtagacatggccatcatcgaagcctgcgaggtcacggccgacggtaaaatttatctgacggccgccggagggatcgctcccaccatttgccgccttgccgacaagatcatcgtggaattgaacgccgcccacagcaaaaatgccatgggactgcatgacgtttacgaacccatggatcctcccaaccgccgtgaaatccccatttacaaacccagcgaccgtatcgggaaaccatacatccaggttgacccgaagaagatcgtgggcatcgtggaaaccaactggccggacgaagcccgttcctttgccgcggctgaccccctgaccgataaaatcgggcagaacgtggcggacttcctggccgccgacatgaagcggggcattatcccctccaccttcctgccgcttcaatccggcgtgggcaacattgcaaacgccgtgctgggcgccctgggccgcgacaagaccattcccgcctttgaaatgtacacggaagtcattcagaactccgtgatcggtctgatccgggaaggccgcgtgaaattcgggagcgcctgttccctgaccgttacgaacgactgcctggaaggcatttacagggatatggacttcttccgcgacaagctggtgctccgtccctcggaaatatccaacagcccggaagtgatccgccgcctcggcgtcatctccatcaacaccgccattgaagccgacctttacgggaacgtcaactccacgcacatcggcggcacgaagatgatgaacggcatcggcggttccggcgacttcacgcgcaacgcctatatttccatcttcacctgcccgtccgtcgccaaggacggcaagatcagcgccatcgtccccatggtctcccaccacgaccatacggaacatgacgtcaatatcatcattaccgaacagggcgtcgccgatcttcgcggcaagagcccgaaagaacgggcccagaccattatcgagaactgcgtccatccggattacaagaatatcctctgggattacctgaaactgtccggcggcaaggcccagactccgcagtccatccgggccgccctgggcatgcatgccgagctggccaggagcggagacatgaagaatgtcgactgggcccagtacaagtaacccatgtctgccgtcattgcattggcgtccatgacttcacgttaaccctacaggaccgctcccgcgcagggagcggtccttttcctttttcccgtccttctccacttcccgctcctctcccatgaactggatgatttaccccgcagccaaggcatttatcagagcctgcaccttcctcttcggagcaggcgtcacggcgaccgtcctcattcatcttttcatgccccttttcctccactgcccacggacagccgcgcccttcctgcttttgggaacatggtcggaactaatctccatcctggccctgtctttcctcctatcctggggaagcagggtcctgctggcttcccaggggagcaggatcacaagaattctaagcgcgctggccttcctgcccgccctgtactccctcctcattccgtttgcggggatgcccgtcttattgcaatacgcggaaatggacaaggtttgggagtccttcctccttctggcggccatcatttctttcttttccttcccttatacggcgggatacggatccgcaggcagaaggacattcctggcctggggcattgcggcggcaggctgcggactgcaaagcgtcctgttcttcctctccaccctgttgcggcagtgcctgtcctccgtggctccctccctggcaacgccagctgcgtggctggccattatcctgtcctgcggcctcgaaatcctgctagcggccctttccgttattctggtgcggcgcctttttaaaaacgccatgtccatagcctccatgccggaattgatgaatccttccatgccggacagccgcccgtaggcccctctctccattcctacaggctttccgaaagagttcctgcctcatcctgcgaaatgaatgcgcgcgctccgcgccgcggcccttcttacagcccgggtgcggctcccggagcgccgaagccttttacggctttgaataaaaaaccggcggcatcatttatccgtccgggaacacggccgtccctacgggcaggcactgcaagggaggcacccacgccctccgggaatcccgggctacggcagggagccaacgcaacccgggccattttcccaggcaggggaaacaggagcgccgctcggaacgttacttcaccaattcgtccaaataacagccgtagccgttatttttcatggctccggcctgaatacgcagcgtttctgcggaaatccagccgttgttgaaggcaatctcctccaggcacgccaccttgaagccctggtggtgttccagggtgcggacaaacatggaagcctccagaagggtgtcgtgcgtgcccgtgtccagccacgtatagccgcgcgccagcttttccacgcgcagaaggccctgtttcaggtactcctggttcacggaggtgatttccagctccccccgggcggatttgggaatcctcttggcgatctccaccacctggttgtcgtaaaaataaaggcccgtcacggcgatgtccgacttgggcttgagcggtttttcctcaatggaaacggcctttccttcttcattgaactccaccacgccgaaacgctgcggatcgtgcacctggtaaccgaaaatggtcgccccgctcgtcagttcagcggcgcgcctcaacttctccgtcaggccgcgaccgtaaaaaatattgtcccccagcaccagggacacggtatcttttccgatgaattcctccccgatgatgaaggcctgagccagtccctccggcctgggctgttcccggtattcaaaagttacgccgaacctgcttccgtcccccagcagatcctggtacagaggcaggtcccgcggagtggaaatgacgaggatttcccgtatcccggccagcatcagcacggaaatggggtaatacaccatcggcttgtcgtaaacgggcagcaattgcttgctgacggaaagcgtgacgggatgcaggcgcgtgccgcttcccccggccagaacaatacctttcatatcaatttcctagccattggttcccagacgttccagacggtattccccggacaggattccccgccaccagtcctcatggtccagataccactgaatggttttcctgaacccggaggaatggtcctggcgcggagaccagcccagctccctccgtattttggacgcatcaatcgcatagcgcaggtcgtggccgggcctgtcctgcacaaaggtgatctgctcccggtagctccggccgtccgcgcggggccgcaattcatccagatgggagcacagcagctccaccagctccagattcgttttctcgttattgccgccgatgttgtacgtttcgccgggttttccggaggaaacgaccgtcagcagggcttcgcagtggtcctccacgtacagccagtcccgcacgttttcccccttgccgtacacgggaatgggctcgccgcccagggccttcaggacgaccacggggatcagtttttccgggaactggtaagggccgtagttgttggaacagttggtaatcagcacgggcagcccgtacgtatcatgccaggcgcgcaccagatggtcgctggacgccttgctggcggaatagggggaatgggggcggtacggcgtggattccgtaaacaggccgtccttccccagggagccgtatacttcgtccgtggaaatatggtggaagcggaaacgctccttcttctccccctccaaggaacggtaatattccagggcggcctggagcatggaaaaggtgcccatgacattggtggtcatgaaatcccccggatcgtcaatggaacggtccacgtgggactccgccgccaggtgcatcacccaatccggtccgtattcccgcagggtgttccgcatcagggcggcgtcccgaacgtcggcgtgcaggaagcggtacgccggagaatccgccgtgccgtccagggaacggacgttgccggcataagtcagggcgtcaatattcaggacttcatggccgcgctcaagcagcagcctgaccagattggagccgatgaatccggcgccgcccgtaacgataactttcataacactgttttcagggaaagatgcggcgccatcatacagcagcggcagggtttttcaaaacaaatccgcccatgccgccgggaacatggaggcatgggcgcggaaaagcgggggcaggaaccgcggaaccggctagcagctcagttcccggcagaggttgatgatgtccggattcacggaatactgctgcccggccacggcgtccagggaggcatagccgtactggccgtcatggtacaccatgatctggttgatgtccccgttgttcagggcttccacggcgcgggtggcaaagcgggtgcccatcaggcggtcgcgggcggtgggcgagccgccgcgctgcacatggcccagcacggtcaggcgggtgtccatgccggcgcgttccgtcagccagcgggtcaggtactgcgccacgcgggtgccttccgccaccacggcgatgatgcagcttccttcctcattgatgacgggctggaggcgcttgtaaatggattccaggtcgtaagggatttcagggacgatgcagatgtccgccgcgctgcaaagggcggtggtcatcgccaggtagccgcagtcccggcccatcgtctcaatcacgaaggcgcggtggtgggagcgggccgtgtcgcggacggagtcgatgcagtccagaatcacgttctgggcagtgtccacgcccaggcagtaatccgtgccggcgatgtcgttgtcaatcgtggccggaatgccggcgaagggtacttcaaaatcgttgaaaaagtcgttcagcgcgcggaaggaaccgtcgccgcccatgataacgagcttgtcgatgttgcggtccttcaggtgttcgtaggcctgcttgcggaattcataatcgaaaaagcgcttggaccgggaggagcggaggagagtgccgcccctgtaaatcatgtcgctggtcagttccctggtggcttccttgatttttccatcgatcagtccttccaagccgtcatagacaacgtacgggttcattccaagctggcgggcatgatccacagccgccctgatcgccggattcattccggcggcgtcaccgcctgatgtcataatggctattccactcataagtaataaggttaacttgtccggggggaaatgttaccgggccgggcaaataatgcaagcgcggagtttttgctggcgcaataaacggcaacgcttcatgatgcagcggcatgaacgacaccgcagcagccattctgaaggccacggccgccctccgggacggtacggagcggctccagttcggagacccggtccactttacctacaacccgctcacctacgcctgggcgccgcatgagcagtacgtgcgcgcctacgggaacggggaaaagagccacttcttcctgggcatgaatcccggccccttcggcatggcccagacgggcgtacccttcggggaagtggatgcggtcgtcaactggctgcacatccgcggagaagtcggcaggccggagcacacccatcccaagcgtcccgtggagggcttcggctgccctcggtcggaagtcagcgggcgccgcctgtgggggctctttgcggaagccttcggcaccgcgaaaaacttcttccgtcacaattacgtggccaactactgcccgctgatctggatgggggcaacgggagccaacatcacgccggacaaattaccggcggaacagcgcgccgccgtggatgcagtatgcatggagcacctggtttccctaatcaccatcctgaacccgcatacgctggtaggggtgggagcctacgccacgcagaagctgcgggacgccgccgaacggctccccggcaaaagcttcaccatcggcaccctgctccaccccagccccgccagccccatcgccaacaagctctggccggaacgccccctccagcagcttaaagagttgggcattttatgaagggttgagagttcagagtggagagtttagtgatggagggaattactagagtaaaaagcaggaaatttgctgttcggatcgttcgtttgtaccagtttttgtgtaatgagagaaaggagttcgtgctttcaaaacaactgctgagaagcggtaccggcattggagccaacctggcggaagcggaatgcgccatcagcaaaaaggatttcctttccaaaatttacattgccttgaaggaatgctcggaaaccctctattggctggatttgcttaaagacacctctttcctgatggaagaaatgcacgccagcatttaccgggatggagaagaactcaaacgcctcctcacctccaccacaaaaaccgtctccctccaaatcaaaaaataattcttaatctaaaactccactctccactctccactctccactctccactctccactctccactctccactctccactctccactctccactctccactctccactctccactctccactctccactctccactctccactctccactctccactctccactctccactctccactctccactctccactctccactctccactctccactctccactctccactctccactctccactctcccgcctcaggcctttttactggacagggagaagagggttccgtacagtttgcgcgatattcaagcgttccgaatttatggcaatttcagattacatcgtgaccattggcctggaagtccactgccagatcaagacgaagagcaaaatgttctgctcctgcgagaccggctttggctttgaacccaatacgcgcgtgtgccccacctgcctggggctgccgggcgccctgcccgtcctgaatgagttcgccattgaacgcaccctgctgaccgggctgatgctgggatgctccagcccggaggtttcccagtgggaccgcaagaattacttctacccggacatggcgaagaattaccagacttcccagctggacctgccgctgtgcctgggcggggaggtgcccctgtatccctggtcctacccgaacgacgtgatcaaggccggcgtgccccccttccgcaccgtgaagctgacccgcatccatttggaggaagacgcggcgaagatcacccaccacgccaattattccctgattgactacaaccgcgcggggtccgccctgatggagatcgtctccgacccggacatcgataccccggaggaagcctacgcctacctcaagtccctccagcagattctgaattacggggacatttccgacgcggacatggagaagggccagatgcgctgcgacgtgaacatttccctgcgtccccacggccagaaggaactgggggcaaaggtggagatgaagaatctcaattccatgtccgccgtacgccgcgcccttcattatgaaatccagcgacaggcggaagaactggacatgggcatcgcacagatccagtccacccgccgctgggacgacgaacgcggggaaagctccatcatgcgcaccaaggaagacgcgcacgattaccgctatttcccctgcccggacctggtgcccatacacaccgccccgctggtggagagggtgcgcagccagattccggaactgccccaggaacgccagaaaaggttcatggaggagtacggcctgagcgaatatgacgccaacgtgctggtgggagacctggaactggcccgcttctttgaagaggcggcgcagggaaccgccagcggcaagaagatcgccaactgggtcatcaacaacatttccgccgtgctgaatgaaaaaggcatgcgcccgtccgaatgcccggtgaagcccggcgccatccgggacctgatcgccattattgacgacggcaccgtttccaacaaccaggccaaggacgttttcaccaggatgtgggaggaaccgtccctcaccgcggcgcaggccgccaagctgctgggctttgaaaaggcggattcctccttcctggacggcatcgtgcaggaggtcatttccgccaatccggacaaggtggcggaaatccggggcggcaacgacaagctcctgaactggctcaccggccaggtgatgaaagccgccaaaggcaaagccaacccgaagatcgtgacggaagcgctgaaaaaggctctttcagaacagtgaccaaatactaaagatgaaagaccaaatattttccggcacgagctttagtatttggtctttcctatttagtatttttgttcaagccctcagggcttgaacagctttcggttcccggccagggtgttccacacctgcttcacttccccggtcagcgtctgcttgaccatcgccagggagaagtccgcggcctgccccaggctgatgtaggggggcagcgcgatggcatcccggtccacacgggcatccagcagagccgctcccggatatttcaggaaggcctgcaccatttcgtccacctggcttgacttgtccagcacaaagcccttgatgcccacggcgtccgccacggcggcaaaggaggggttgtccaggttgatgccccacggaatcaggcccgcggcctgcatttccaactggatgaagtccaggcagtcgttattgtacaccatcagcttcaccggcagcttgtactgcgctatggtaatgaggtcccccagcagcatggacaggccgccgtctccgcacagggcgactacctggcggttcgggtacgccttctgggccccgatcgccatcggcatggcattcgccatggagccgtgattgaaggaagccagcgtttttctgcccagcgtggagcacaggaaacgcgcgctccagatgcagggggtgcccgtgtccacggtaaacacggcgtccggagccgcgtacttgttcacggcggtggtcacctgttcggggcggatgggcgattccttgtcgttcccgtccatgtaggcattcatgtccttcacatccttggcgtgacgcttcagggaggcgtccaggtggtcggaatcctttttctcctccaccattcccagcagggcgtccaccgtggcgcccacgtccccgcagattcccaggtccaggcggcagcggcggcccagcacttccccgcgacggtcgatctggacgatggcgggcttggtaggaaggaagttgaaataggggaaatccgtcccccacatcacgatcaggtcgctctcatgcatggccttgtacgcgtcaccccagcccagcagtccggtcatgcctacgcccacggggttgtcatgctcaaaatagtccttgccgcgccaggtataggcaatcggggccttcacgcgggcggcgagctgcaccaccttgcgttccgctccggcgcagccgcccccgcagaagaaagtaatgcggtcgtgtgaagcgagcatctgcgccagccgcgccacggattcatggtccggaaccactgtttcccgggcgaaggcgggtggatgcaccaggtctttggcctccgccggcgcgtccgccacgtcgcccggcagcacgatgacgcccacgtcatgcagggaataggcatgctggatggcggacatcagcacgcggggagcctgctccgccgtggaagccagttccgcataagagctgcattccttgaacagttgttccggatgggtcacctggaaatagtccacccccacctggctctgggggatgtgggaggcgatcgccagcacgcgggccctgctccggtgggcatcataaaggccattgatcaagtgaagattgccggggccgctgctgccgcagcacacggccaggttaccggtcagctgggcttccgcactggcggcaaaggcgcccacctcctcatgcctcatgtggatccattcgatggttttttttctgcggagggcgtccgtaatggggttcaaactgtctcccacaatgccgtaaatgcgctttactcccgctttttccaagatttcaacaagctgatcagctaccgtatacatgcagattagaccaagaccggttgaaaaaaatcagtgcttgtgtgtcatagataccggaagttccttccgcgcggaaaaccatgacggattttcaaacagccgcctctcctgccgggaggctttttccttgaagaaaccgcgttggagtctatcttggcaaggtagttccattttccttgataccaaaccatgaaattcctcactaaagctctcctgatggccaccgttctgggaagcgttgccaccgttcccgcagcagtcgtcttcccgggccccacccccggcgcggccaatgcggagcaggcgccctccggctataccctttccaacaacatcctgacggccaaattcatcaaccggggcgggaagctttccttcggaggaatgacgtccaaactgggccctgtagccaaggccggggacgaattgttcatcatcaaccttcaggacggccagagcatcaagtcctccggcctgaaggcgggggacgtcaaactcgtcaccctccagcccaatcccaaggcgttcaaactggcggaccgcttccccggaaaagccgtcacggcctccttccaggcgctgaacggctccctgcacatttcctggcgcgccgtactcagggacaattcccactacctgcggcaggaactccgcctggtgagcacaaagcccattcagatgaaaagcatcgtggccatgcagtatgacctggtggaagggaaggcgggttccccctccgtttccggcaatgccaggggcgcgctcatcgtgaacgacctggcgttcaccgccctggaaacgcccatgggcatcaacaccgtgggaggctccggaaacgcggcaggcggggagtccacagcctggaacgcggacaaatggtccacggcttcatggacgggcaatttcaacattccgcaggagctgaaaaagcagtacggggaacaggtagcctgcgcggaaggccccgtcaccattgacggcaagggctcctgcaccattactttccagtacaagggaggcgacaagggaaacaacaagctgaacaccgccggcgtgcagctcctttccgccaagggggccgtccttgactccgacttccacgccgggagtaccggagacgccaatgccaacaattcctacaccgtaaaagttcccgccaaggggaattacctgctgcgctactgggtccagaccaggagcgaaccgattgccagcaagggggaaatcactttctccctgcccgtgcgcacgctggaggaaaaggaagacgcccaggcggacgattcccagctcgcccagggcgtctggagccgcaaaaccaccatgcagcccagggaggtgtgggaggtgtcctccgtcctcggcatcttcgcccccggccagcaacgccgttccttcctggcctatatggagcgggagcgcgtgatgccctaccgccccttcatccattacaattcctggtatgaactgaacatcaaccggaacaatgattcagaccccgccaagcgcatgacggaagaacagtgcctggccgtcctgaaggattggcaggaacagtttttccagaagcgcggcatgtccattgacgccttcgtctgggacgacggctgggacgagttcaacagcctgtgggatttccacaagatgttcccgcagggcttcaggcgcattgacgccgccgcgggtaaacaaaaggccggcatcggcacctggctgggcccggtgggcggctacggtgcctccaagggcaagcgcctggcccactggaatgtgaagcacccggacaacaagatcggcaacttccagctttccaacaaggaatactttgacgcctttgtgggccgctgctcccagatggtgaaggactacaacatgaagtacttcaaattcgacggcatcagcacccatttccacgccaagggccccggcaacgaggaggatgcggaaggcatcatccgcgtgctgaacgccctgcgcaagaagaagggggacctttacatcaattgcaccgtgggcacctgggcctccccgttctggttccgttatgcggattccgtatggaggcaggaaaacgacttcggaacgattggcgtgggcgacaaccgcgacaagtggattacctaccgcgaccgcctggtgcatgaggtctttgtgcagggttccccgctgatgcccatcaattccatgatgacccacggcctgatggtcaccaagttcgggccgcccgcgtgcatgccccgcgaccctgaaaacgtgaagaaggaactccgctgcgccacggcctgcggcacctccctgcaggagctttacgtggacagggacctgatgaacgccaaggacggcatgctgtgggacgagctggccaagggcattaaatggatacgccgcaacgcggacgttctggacgacgtgcactgggtgggcggcaacccgtggaacaaggaggccaatgaaggggccgtgtacggctgggccgcatggaataaaaacaaggccaccctggccctccgcaattcctccgaccaggaaaagagcctgaccggcaccctgcgcggcatcctggacattcccgcggacgtcaagggggccatcaccttcaaggattcctatgacgaccagcgggagctggacggcttctccggcaagaccgtaaacattgacaaggagctcaccttcacgctgaagccctttgaagtgctggtgtacgaaggaggaaaggtcaaataaaagcttccggagtcccggagccacgctcccgctcaagcagaagcggcacttgaaaagctacattgggggggaggctggaaaagcagcctccctccattttttccacccgtccctgcgcccgggtcagaacgttttctcaaacgtcaccgcttccagcgggtcggaggggttgaccggcatcaccaggcattccgcattctccccgcccaggtacagcgtcaaactgctgccgggggaataaacgatggagacgccgtaatatccccctttcttcaccagggaccaggttccgcggcaggaggaaacgaggtcctcctccagcacggaaaggtcatcccggtcttccgggcgggaaatccacctgccccacgcctccgggcgcgggaaggaggaaatctcgcacgttccgtcttcattcaggagaagcgtggaggagctgacctggaaaaagcgcttcagctccggcggccggaaaaaccaccgctccctgggggaggattccacctcgtactttccggacagggcctggagctccggctcctggatccacaggaaagtcttttgatgcatcacctggcggcacgccaggcccaccacggccagcagggaaaggaacgccagggcaaacgcccacagggccagccgctttctccaccacgcatacacggcggccagtcccgccacgctgcccacgcagatccagaacccccaggagcgggagaggaaggcaagggcgtccgccagtacggaaaggccatgagaaagatcattccacataggtgcttcagaatcgccggaactccgtcaaagtcaaggcaacaatgccgccttttacggcacgggaggcaagccgcgccgctcctttcccaaaaactcccgtcatcatccctgaaaatcctcctccgcacttttctcacggactccaatcaggtaaagaaacatctcaaccatgaagagtgcagcacatcaccagggactttcggaacagcaggttctggaaaaccggaccaaatacggggtcaatatcctgacgcccccggtaaaggaacccctgtggaagcagttcctggagaaatttttcagaccccatcatcaagattctgctggtggccctgctcctgtccgtaggcgtggcctgctaccagttcttcaccggagcggaaccggccagcgtcttcctggagcccgtgggcatcctggtagccatcctgctggccacctgcgtgggcttcgccttcgaggtaagcgccaacaagaagtttgaaatcctgaaccaggtcaacgacgagaccatggtccaggtgatccgcggcggcaatatctgcgaacttccccgccgggacgtggtggtgggagacatcgtcatcctgaacactggggaggaggttccggcggacggcgtcctgctggaagccgtttccctccaggtcaacgaatccacgctgacgggggaacccctcatcggcaaaaccacgaatgaggcggaattcaagaaggacgccacctacccctccaaccacgttctgaaaggaaccaccgtggcggacggccacggcatcatggaagtgacgtccgtaggggacaggacggaatacggcaaggtctatgaaggctcccagatcgacaacaaggtgcagacgcccctcaaccgccagctttccaggctgggcgacctcatcacctgggccagctacgccattgccgcccttatcatcatcgggcggcttaccctgtatttctcccacctgcccggccccgtggaatggctgagcgcgggaacctacattctgaacaccgtcatgatcgccgtgaccgtcatcgtggttacggtgccggaagggctgcccatgagcgtcaccctgagcctggccctgagcatgaagagcatgctcgccaacaacaacctggtgcgcaagatgcacgcctgcgaaaccatgggggccgccaccgtcatctgcacggacaagacgggcaccctgacgcgcaaccagatgaacgtatacaaggcggacttttacggcctggggaacgccgccccggcggacggcgagctggacaacctgatccgggaaggcatcgccgtcaactccaccgccttcctggactatgcggacccggaacacatcaaggccctgggcaatcccacggaaggggcgctcctcctgtggctgcacgggctgggcgtgaattacctggacctgcgggaaaacgcccgcgtgcaggaacagctcactttttccacggaacgcaagtacatggctaccgtggtggaatcccccctgctggtcaaaaaagtcctttacgtgaagggcgcgccggaaatcgtgctgggcctctgctccaccgtcctgactccggaaggccaggttcctgccgcggacatgcgccccgccattgaggaacagctcctggcctaccagaaccaggccatgcgcacgctgggcttcgcgtaccgaatcctggatgatgacgccccggtgtttgaggacggccgcgtcatccgcaaagacctggtttacctgggcatcgccgccatttccgaccccgtccgggacgacgtgccccaggctgtgaaggactgcatggacgcgggcatcaatatcaagatcgtcacgggagacacccccggaaccgcacgggaaatcggccgccagatcggcctgtggacggaggcggacacgccggaccgcctgatgacgggcgtggagtttgaacagacgccggatgcggaactgctggaccgcgtgatggacctgaaaatcatgtgccgcgccaggcccatggacaaggaacgcttggtgaagctgctccagaagaaggaccaggtggtggccgtcaccggggacggcaccaacgacgcccccgccctgaacgccgcgcaggtgggcctctccatgggggacggcactaccgtagccaaggaggccagcgccatcaccatcctggacaattccttcatgagcatttcccgcgccgtcatgtggggacgctccctgtaccggaatatccagcgcttcatcgtcttccagatgaccatcaacgtggcggcctgcctcattgtgctcatcggcgcgttcctaggcacggaatcccccctcacggtcacgcagatgctctgggtcaacctcatcatggataccttcgccgcgctggccctggcctccctgccgccggacgaacgcgtgatgcaggatccgccgcgcaagacgacggaccacatcatcacccgccccatgggcaggaacattctgggcgtgggcatcctgttcgtggccttcctgttcggcctgctgcaatacttcaagcatgcggacgtcaccagcctcacgcagttcagcctcagcggctacttcggcagctacctggacttctcctcaccggagcatgaactgaccggctatgaactgtccctgtttttcaccatcttcgtccttctccagttctggaacatgttcaacgccaaggctttcaacacgcaccagagcgcctttgcccgcatgggcgccagcatcgggggcttcggagtggtggctctgctcatcctggccgggcaatacctcatcgtcacctttggcggcaagatgttcaacgtggtgcccctgagctggacggactggggcatcatctttgccggcacctccctcgtcctgtggatcggagagctggtgcgcgccttcacgccggacaaatcctccgcccgcccgtaagacgtcccgccgcgtcatccgggtgaaaatccacctgcatgacacggacggcgctgccgcccggaaaaccttctttcaacaaagaagcccgcgggcgtgtcactcccagcatggacttgacacgcctgacgggctctatctccggccccgccgttttcctctgcctgctttccctcttttttgccgggtgtaaaaagacggaacaggtgccgcatgaaacgcccacaattatttacgaacatcccgtcaccatggatattccggtgacgggcagctgggtgggccacctggacggcgtggacaacgcctccatcgtcccccagattacgggctaccttcaaacgcagaattacgccaatggcgctattgtgaagaaaggggaagttctcttccgcattgacgattccacgttcagggaccaggtatccaaggccaaagccaccctggcccaggcgcaggcccagctccagcagttgaattatgacgcggaaatttacaggcccctggccgcggagaacgccatttccaaacagaaatacgaggatacgcgcctctccgccctggccgcggaagcgcaggtgcagcaggctgcggcggccctggccctggctgaaaaaaatctttcctatacggtgctgtacgcgccttttgacggaatagccggcatttccaggacaaacatcggcgacctggtcagcccggaaagcggcccccttgccgtcgtctcctccgtcaatcccatacgcgtcaatttcgccgtcacccagcaggaatggattcagcaggcggggaaaaacgggaatgaaggcgtccagacgggcagcaagctggacattacgctgaaagacggcaccaaatacccggaacaagccacggtagttgccattgaccgggcgttcaatccccagacaggcaccatccgcgtacaggccaaccttcccaatgcggactatctgctgcgccccggcatgttcatcatcgccacggcccggctggccaccgtcaaaaacgcgctgaccgttccggcaaaatcccttctttcgacacaggggcgctttttcgtgattgttctggatgagggcaaccacccttccatcatccccgtacaagccggaacgcaacttggagaccggcagcaggttactcccctgaaaccggattccctcaccccccaaagcaaagtggtcgtggacggtcttctccaggcggaagcagcctccagaaatccgaccgcccgcctgaaagcggtacccgccagcaaccaataagctcctctcgccatggctgatttcttcattaagcgccccatcctttccatctgcctctccgtcatcattgtcctgctgggggccttttccattctgcgcctgcccatctccgagtacccggacatcattcccccctccatccaggtgacggccacttatcccggagcggactgtgaaacggtggtcaagtctatcgcatcccccatcgaacagcaaatgtccggcgtggacggcatgtcctacatgacttccgtcaacaccaacaacgggcaaatgagcatgatgatcctttttgaaatcggcacggaagccaacatggaccaggtgctttcctacctgcgctacgggcaggccacctcccagctgccgtcggaagtcagcgcgctgggagtctccctccgcaagacaagcgggctgcccgccctggtcgtcagcctttattccccccagggaacctacgacggcctctggctggccaattacgcgtatatcaacatggtggacgccatcaagcgcgtgcccggagtaggagacgtgcaggtgttcggggcaggccgctacgccatgcgcatctggctgaacccggaaaagatggccgccctgaatattacggcccgtgacgtgatgctggccgtccaggcccagaatgccgtaaatcccgcgggcaagataggcgcgcagcccgccccgccggaccagcagctttccttcaccgtaaaagcgcccggacgcctgaccagcgtgaaggaattcgaaaatatcgtggtgcgcgggcaggacagttccatcgtaagagtgggagatatcgcccgcgtggaactgggctcggaaacttacagcctcagttcttccgtaaacggcatgcccgccgcttccatcggcatttacgaggcgcccggaggaaatgccatccagctggtggacaatatcaaagccctgctgaaaaatacggatatgccgcccggcatggattacctcgtttccctggactccacgctggccgtccgcgccgggattgaagacatcgtcagcacgctggtgattgccctgggcctggtggtgctggtggttttcattttcctccagggctggcgcggcacgctgattccggcctttgccgttccggtgtctatcgtgggcgctttcatcgcctttccattgttcggcttttccatcaataccatctgcctgatggggctggtgctggccatcggcctggtcgtggacgatgccattgtggtggtggaagcggtgaagaaccatatttccaacggagaaaagcccctccaggccaccattgcggccatgaaggaagtatccggccccatcgtcagcacggcgctggtgatttcctgcgtctttatccccacgctgctgctgcccggcgtcacaggcaaactgtttgaacagttcgccgtgaccatcggcatgtccatcatcatttccgccttctgcgccctgtccctcagccccaccctgtccgccgggctgctgaaagggggaaaagctgactccattcccctgctggggccctttttcaaattgttcaacaaggggttcaacaaggcgcgcgactggtacgtggaaatctgcgccagacttatccggcacatgtggctgtccatcctgctgctggccgccatgaccgcccttctctttcccctggctaaacttattcccagcggattccttcccaatgaagaccagggctacctgttcggcggcgtggaactgccggacaatacatccctgaacgtcacggcggacaccgccgcgcggattgaaaaaatcatcagggaggatccgggcgtggacgtagtgactaccgtaaacggcttcaacctcatcagctccgtccaaagctcctccaactccttcttcttcatctccctgaaaccctggtccgaacggactgctccgggcatgacggcggacggcatcgccgcacgcctgaaaagcaggctgaacgcggaaatttcctccggcgtggcgtatgtggttccgccgccgcccctgcctggcgtaggaacgtccggggatgtcacattcctgctggaggaccgccagggcatcggggaaaaattcctggccgccaacacgtccaaattcatcgaggcggcggaaaagaggccggaaatagcgggcatcagcaatttcatgtctccctccaaccttcagtacaacctgaatgtaaacacggagcaggccactctccagaatatggacgtggatgagatttacgccaccatccaggcatacatgggaagcaccttcctgaacaacttcaatatttacggacaggaatggcaggtgtacatgcaggcggacgcaccgtaccgggacagcatcgacaagctttccatgttctatgtgcgcaacaatgaaggagacccggttcccctggattccgtaatcaacgttacgcacggctgggccccggaattcctgatccgccagaatatgttcaacagttcccagctcaacgtcaccccggctccgggctattcctccggccaggtcatgaacgccctggaagaagtttttgcccagaccatgccgtccggcatgggatacgactattccgggatgagctaccaggaaaaacaggcgcagaaaggtatcaccatcggcatgatctttgcggcatcagccgtgtttgtctttttgattctggcatccctgtatgagagctggtccctgcccgtagccgtcttcatgaccgcccccattgccatcctgggagcatttctggccctgtggataaccgggctggacctgaacatttattcggaaatcggcctcatcgtcctgattgctctggcggccaaaaatgccatcctcatcgtggaattcgccgtgctggaactccgtcagggcacggacctgctcacggccaccctggatgcggccagaatccgcctgcgccccatcctgatgaccagcatcgcctttatcatgggctgccttcctctggccgtagccacgggagcgggagcagcggcgcggcaggtggtaggcgtcggggtcatcggcggcatgatgacagccgtcttcatcggggtatttttcattccttccttcttctacctgattgccaagctcgccgggctggacaaaaaagcggcgcggaaacttcaggaaaaggagcagggagcccccgcccccgcgaagcaggccgaatgacacttccgaaaggggaaaacggctcccgcacagtttcccattcctcctacatccagaatatccaggcccagaaagccttcacgaacacgagcaccacgttaatcagcagccccacctttaccatggtcatctgagggaatttttcccgtcgcgaaggccagagcgttgggaggagtggaaacggggagcatgaaggcgcaggaagcgcctatgcctaccagaagcaccagcggcgtagcagacatgcccatggcggaggctaccgtgaccatcagcggggccaccagggcggcgctggccgtattggaacagaattccgtcagcgacgtgatgaagaggctgatgatgagcaggatgacgatggggctgtgccccatggcgagagaagatacctgatccgccaggaatcccgccgcccccgtctggacgaggatgctgctgagcgtgatgccgcccccgaacaaaagcaggacgccccagtccgtatttttggcgatgccgctccagttgataaccccgcacagcggcagcagcaccgcagcgctcagcgcgatgagcgtgtccatggacgggatgccgcccaaagcagaggaaaggaaactgctgcacatccagctcccggccaccagcacgaagagaataaggacacgcacctgcctggcattcaacctgccctccgttccctccctttcctccggcaccatatccacatgcatccccagattcgggcggaggaacaggtacatcaggaagaaaacgatcaccccgaacaccaggacaatgggcatggcaatccggaaccattccgcaaaccccatgcctagttcatgcgccgcaatggcgttgggaggagaacccaccagcgtccccatgccgccgatggaggcgctgtacgccacccccaggatggcaaaaggagccgtcgtcttaagtttttccgccggaacgcggtccagaaggccgatcaccagaggaagcatcatcgccgccgtggccgtattggacatccacatggaaagaaacgccgtagccaggaaaatcagaatcagggccatccccaggctcccgcgggccatccggaggatttttcccgccagccaggcatcaattttctgttcgtgaagagccccggccagggcaaagcccccgaaaaacagaaaaatggtaggatccgcaaaaccggacagagctttctcccccggcagaatccccataaacatggcaagcaccggcaccagcagggaggttacggttacgtgcagggcttccgtcagccacaggatgccgataaaggtgagaacagccagccccctggctacctccggttccacgggaagccacttgagcatagccaggaaaagaagcacgtcacacgcaatgatgacgtaattgcggtgccctttgggagtgtcagcagtacggtggcgcataaagtaaagataaacgacgctattttctttgtacgcatcagaaaaacagtgtcaatgcttttccataaaaccccggaaaaggccttccccggaaacagggaaacacggaccagcgcaccggcttgagaatacgcacggcacgcatcaccgggaaagccgcgccacctcttcccgctccgggaaaatacaggaagcccggacatgcaaaaaaaccgccatgcaatcgcacggcggcttgtaaaactgtctgattgatgcacggaggggaaacctccgcccgggcaattattcggcggcgggttcagcggccttctttggcagccggctttttggcgggagccttcttggcggcggcagccttggtttcagtctttttggccggggccttggccgcagtctttttggcgggagcttccttggcggcaggcttggcatccttggcaacgggaacggccagacggataggcgcattggaattcaacttggactgttccttcttacgcttgaggtattcaatacgtctgcggcgcttggtgactttgcggatttgctgtcccatagtgataattgctatgatatttactaattcttaagagctccatgtggcacatgggcgtggatacaactaccaaccccacctcccatacgcaagcacaaagcgttattaaggcacagaaaggcggcggcaggccccggttttcccaccccgcgcgggagaggaagacaaccggggcaaaggaggttttaccacaatttcagcgcatccacccggaccggctgttcccagcgcagatggtgccggatggcggaagagatgaatcccaggccgcgctccaccgccgcaaccagtccatccccggcggccagccgcgccgcgacggcggcagacagggaacagcccgttccgtgagtgctcacctcctgtacgcgcggacgctcccattgccccagcaggcagccgtccgggccggacagcacgtcccggcagtccccctccagatggccgcccttcagaaggacggggcatccgtacctgacggcgaggcgcgcggcggcctccggcagttcatccctgcccggattaacagaagaacggagcaggacggcagcctcatccaaattgggagtaagcaacgccgctcccggcagcaggagctcttcgtaaacggccaccgcctcttcccgcatcaggcggtctcccgccgtggcgatcataaccgggtctaccacaacggggacatccgccccggccagcacctcatgcaccgcacggacgatagccggggaatacagcatgcccgtcttcacggcgcgcacgggaaaatgttccagattgatgcgcacctgatcagccaccagcgcagggtccacctcctgaatgccgcgcactgtcccgggcgcctcggacacgacgcaggtgacggccgtaagcgcaaacgcccccatggcatgtgccgctttcaggtcagcctggagcccggcccccgcggagcagtcggaaccggcaatcgtcatcattacgggaatactcatggccctgtttttaatcgggaagaaagctcttgaacatccaaaaatccgcacgcgccgcctcaatgtcacaaatccgggtgggaaaacaaggagggaatgccacaatcatcccatgatgcacgcttcccccgccccggacgaacaggaattctggcttttcattcaggatgcccctctgccggccgcagaggaattgcaggagagcatgttccgcctggatggctgtttccggctgaacctttccggcgcgccggaaaacgctccggaccatgtgctggaaggagaatatctggatgaagagggggaatcccagctggacgtattctgggtcatggaaacggacgacgcgcgccaggcgttcaaaagggacggcgcggccctccggcagatagggaaccgcaccaaaatgctgcgcttcattctggaagacgaatatgccctgggccatgtattcgccatgatgcacgccatactggaacaccgggacggcctgctggtcattccggactccaggggaaacgttattctggaacggaggaaagctttggatttcctgaacagggaaatcagggaaagctaatgtttctgcgtctgcggagctgaaccgccctcgcgctccgcattcagttgaagcgctttctttttccagacttccgccatatccgcatcctgaggggtcccctttccggtgctgtagcagacggaaagcatcagcatggcgttgacgtggtcctgcccggcggccagccggagccagttgaacgccttgccctcatccgcagacacgccggaaccttccagataagccagtcccacgatatactgggaatgggcgtctccggcagaagccgcctgttcataccacttcatggcacgctccatatcccgcgccactccctgtccctttgcgtaaatgttccccagataaacggacgaaggcgtattccctccattggcggccttttccagcagcgccaggccggaagcggcatccttctcaaaacccatcttcccctccatgtaagcccggcccagcagccccatggcagccggatgttcctcatccgccgctttgtgccacagccccagagccttgttcaggtcctgatccgcgccatcccccttgaaatacatcattcccaacatgtacaaggcgttcccccgctgggttcccgggcgggcaagcccgtactcaaaccactccctggccgctacggcatcacgcttgattcccgtcccatacaggaacatggcgccaatgaccgtttccccggaatacccggacccggtctccgccacggaatcacaccaggcccgcacgtccagcggatgaacccagccattctgcaatccctccgcatacagggcagccacatcattgagggcttttacatgctcgctgccattttccttctcgcggccggcgccggccacagcagcgtccaggcgctctctccatatttccgcctctttccgcaccgcagacggcttttcccgttccgctgaaggagcagcccgcttttccccggaagaaggggcgcggtcacatccgctcaaaaaaaagaaggcgaaggaagccgcacataaagagacaacttgtttcatcatgacccttaccataagacagcctcaccaggctgccaagaagagaaatgacggaaacgccgcatccgcacgccacggaagcgcgaagccggagagccggatttcctctttttgcattgaatatttccctctttttgctctactgaaaccagttctacctctgatgaaattcattctgcccctgtatctcttgacatgcctgggcccggcgttcctggtaagtttttcctgccggggttccgcgacggaacttcccgtaaaatacatctttgagctgtcggatgaaccggtaaaagtacatcccggcaaaatagataccaaaagcgttttcttccccaaatacgcgcgcggcacatctccggaaaccctgaagcggcaggccgcccttttccaatcccatagtccccacgaagcttccaaaagcaaaccggccatcagcatccacatgaatgacgacaaaacggaaagggacgtccatgaacggtctggttatgagtttcaccatgcggaaaaccaggaagaaatagtcatcacaaccgaaacgccggatgaggaagtctggctgaacgacggggatccggacagcccctttttccatacgccccgttccgccgccaatacggaaattcgtgaaatccccacgtcttccgattcctggcccgcctggaatgaagaggaagtcaacctgcacatgaatcttccggaatcggcgccgcgccccctagtagtgcagccggctccgtccggagccatccgcaccatcatcaaatcctttaacggaaccgtttttgaggcggatgcccagcccatgcatcccgtctgggatcagctcccgcccggatacgttcctatcccggctctcccggcctatcagcccaccttattgaagaaattacaatagaagggggcaaaagcctcagaacttgaagcggacagccccgaaaacagaccatccgttaaaggctttggccgttgccgagtccacatggctggtgacatactctacagccagcatcagcttgaccgcattgacggcctccggacacagatagcaattcagccccaggtaaaaggaatgcatgctgtccacccatgcgggataatgggtgacgctgggcacataacgggtattcagcttcacagaacggtttccaaaggaacactggtattgaaagacgccctcaaaatgcggggaaatccggtaaacgggctgcagaaccaggccgtacacattctttgcaccgggctggcctacaattcccacgcctgccagcaaattccccatgatggagaaagcgccgcggctggcgtcccagctcagggaaatcacgtcctgcgcgcccgttccgcagtaatcggacgtggaagggattttccttccccgccattccgtaaaattatgggcatactggtaccccagaaactggctgtcccacatgggagaagccaccttccacttcatggcgttcaggataaacaggttgtctgcagaatgaaactggatctcatccttcaaatccgtaccgttcgcattcaggtaaacgccgtaggaatggtacaggctcttggcatccttctgaaaattggcctccagaccccagttggaaatgggaatcaattcattgcacagggcggatctttccactgttttaatccgggaggaagccaggcaatactccgacgtcaggtgaggcgtcagcttaccggccctgaacttgacgccgggcatggtcttttccagataaagttcatacagggaccactccgtatggctgccgatccattctccccgcacttcacggtgccggccttccaaatcccccacattcgtcagattggacaggcgccaggaaccgtcccccatcaggatgtcgccgcccaggtaagcgcgcctccacccgttgttatggccgccggaagacgggcagaatttattggccccattggggctgacggctgctgcctgatactggccaatcagcgtcagcttcaccttcctgatccatgaggaatcattccggtacagcaccggaccgcgatccagcacacggcacagggacggcagagagcccccggaaaccggctgggactgaactgctcccacaccggcttccgccgccggaaaggcggcataccaacaagcggccaacaggaacattcctggaaaaacaagcttcatcataggctaaacaaacaaattgggcgcacatcttaaggagccctctccgaaaatcaagcccggatgctcctttcgacattgttgttttctgaaagggttgttacgaagaacggcaatgatggacgcaccagtgcgcccatccggaacgtctccatcagaaggccagggacgcaggtttcagcacggcttggagttacagctacatcggcctgttgtatctccggcctgatgaaccgggccatttcaatcacttcctgtacgatgaagaaacaacgatgcagcagcctggcatcatcgcgaacagttaccggcaccaaatcatcactccggcaagctttccctcccggcccgcatgggggaacatgcctgaataattatttcccgctcctgcggggaaaggccgtaaatgtcttccatcagcccattcatccgctcatccccttccgggcaatagcggaccgcgagagcgtccgccagcccttccacttcccgcagcagggacagaccggggacccggatgggagcccggaggacaggggcggtatccatctggaaaaaatccccctgcatttttccccggcggagaaaccaaaactgcatcaggcgcgaattgaacagggccgccagatatttcatgctcacgcgttccgagcgtatcacgttgaatgccatcatcacataagcttccttttccgtataggagaaggttggacgggcacacttcctgacagccagaattttggggccgggccggaaaaaacgttcctgccggggccagtgcacatggtaatatttcatgcggcccatgcgtgtttcccgccgggcctccatcaggggacggaattttttccaaatggcgcaaaagcgtaacggcctgctccgctccgttggacggagtcagatataacagcaccttctccggagctttcagtgcatgccgccctgcctggacaggttcatacagaggtttgagaaaacgccgctcccgttccggcaacaggccaaaatacccctgaggcaagacaaataccccatcccccctccggattccgtaccgccgcactgtttccggcgccagattctccagcgcacgggcggaaacgacatcggggttcggaacaatcccctgcgtcatttcctttgcggcatccagcctgaaattccggcaggcatccatcttttccagaagatgccgctctgctgcagagcagaaggacaatccttccctgacgcacgctccggcatcttccggcaagggaaaccgacggtacggctcatgttccagaaatgattccacgtcattcaaggagccgccaaaacggcggtattccggaaccaggcgtccgcctccctctccctttttctccgccagaacagtcatggtatggacgcgggcggattcaaacacgcggcaggctccgaaatccgacaggcgcagcaaaccgcaatcttccagcagcttgcggcggagagaggcggctcccgcattagacatccacttgttgggaacgaccagatgcattacgcccccccgcttcagggcatccagccccacacaggcaaacacgtaccagtaatccatgcgggaagagcagtaggaagcaagagaagaacatttcaaacggtcaaataattccttgttccctttttctccgacaaaagggggattgccgatcaccaggtcaaagcctccttcctccatcaccgttgaaagaccctgacgccagacgccggacgcagacatatccagactgtccccgcacaacaggcgatcccgtaaatcccccctttcctccggcggccaaccatgcgcaacgaaaacggaaacgggccacctccaatgcctccgcgcaaacatccactccgtaaatattctcttccaaaacggcgcggattaaatcgggctccgggcaatccggttccagaagctttctgcgggcgacaagctcccgaagcattcccatggtgaatgcccccgccccggcggataaatccagcacccggatatttctcagcaacccggcttcctcattaccattccggggagcaggcaatctggatgccagccaggaggataccgcctcccgggccatccagcggaccaggaagccgggagtatacacggttccggaacggcggccatccgtcagggagcgttccagcaatccctccagcacggaaggagtaacagcccggtgagcatcctcttcccgcagggaaaaagagaatccttccggaagacggaattcatggtccgcctgccgttccagcaaattgttcaccaaagcctctttcaaccgcctccaggcttcgggacggctcccctttcccttctccgggacgaaacaccgggccatgaaacaatcctgaacgctccgctccttcactgccgtattcgtacactaccagaccggaccacgcaatcaaaagcaggaattgccccggatacctccctcactacatttctgtacgggacgctttttcttaacgtctccggcgtgtttacgttgctaggttttgattcatggtagccgcaaccatttcataattctaccttcattgccatgaacaacactttcaacatcggcgccatggacaccgtctaccccttcattcccatgtaccccaacgggcagccccagggcaacttcctggtcaacggcctctccgctcccgtccttatccccaaacgcgctgcttcctcccccacccggcacgaatggttcggatacctcaaggtcatggctcccgccacctgttttctccacctccgcgcccactcttccatctccctttccattcccgccaaggatctggaactctccacggagccgggctctttcaccccctctccgccgccagatccagttcgaccagggatactactggtgccacatcgtccatcaacaccagcccgaccggggggcggaagccgagttctgcattgccctggttagcgacaaggaaggcgagcccgacctggattattacctgctggcggaaaacactcccgccggcaaggagggagaaaccgtcctgaccctggtcaacctgtaccaggaggcggaagaaggggactcgtcgagcagttcggcagggggaggagattcgtttgagtttgatcccaagccaagcagcagttcgagctcttcctcctcgagcagctccagtccttcttcgtctaactcatcaagttcttcgagttccagcagcagcttttcgtcatccagctcctcttccagcagcagttccagttccctctccttttcctccagcggagccggaggaagggggttgtccatgcccctgttcctgtgattgcgacgaagacatcgaacagtccgattgcagcaagaacacctcccatttcttcggcggctatccggacggggccgacgactgcgaaggcttactggaaatgggtgagggcgattccgaaggaggaagtggaggaggcaatcccccgcttctccgcacccttgccgaaccttccgccctctcttccatcaccctgcgctacaagcatcccctcgaatggaccgcctcctgcaatcccgaaaccggacagatctccgtcaaacgacccacgggcagttccatctccttccaaagttcaaacggcggttccgaagcctccgtctccggaagttcgcgcaagttgaactacaaggttcagaagctgaatgccgacaagtctccctgcaccggcggctctcccgcctacctggacatggtgcagagcaatgggcgcaccctgcgcttctcggcagccaccggaaaggtcgtctccctggtctccgcctccggcgtggaaaccacggcggaagcttattcccgtcagatgaaggtgaaccgccatccttccacgggagctattgagagcatctggtccaagtcccggggactactacaggcagtttcggaaggcagcaagctcaggatggcgcgtgctgccgaaggcggccagcttcgcattcctgagctttacgtccttcatggtgttgaaaaattccgtctccacttatgcctatgctcctctcaccggagaactcgtctccgtctcccacaacgacaacactcccggatgggagtttacctacaaccgcattggacaaatgacctccgtccgggacgcctccggcatcagggaatgctcctacgatgcctatggccacatgatccaggacacttcctttggaaccgtggaaaactgcgcccaggaacaatacgatgccttgggtcgttccaacggatatcgcctgattcttggaacccgtaccgtgcagcactcccatcttgactacgattccaaaggtgccatcatcgggatgaatctggaaggactggagtctccatttacctggcagtatgaccaacccagcggcttcctcaactatctcacctaccccaacggcatggtccgctgcaatacctatcatcccaggctcgacctcgtaaccgccatcagttacagaaagggagcggatggcgaattggcagccggccacgaatacggctacgacgcgctgatgcgtcctgtccaacggcgggactcctgggatggaaccacacctgcaaccaccagaaacttcacccacaacagccgcagcgggctggtcgaagaccggatcagccggggaggaagctttatctattcctacgacaacatcggcaaccgcaagaccgcccgggaaccggaagaagcagtatcctatgatgccaatcggctcatttcgtctccaggtggagctgccgctaaaaacaccgctaaagttaatctccaacatattaccacaaaagaatcgaaagagttaattataagttccgggaaattaaggggacctgcatatgcagttaatcgcgaccctgcgttacctataacgcgtaaaaccctcggaagagtaggaggccatggtcatccggatgattttgttcaaatccccatacctgaatcagcatatccatattttaaaaatccagttggcggtcccatatctacaatacatcgagcattaggccatgatcactctagatacactatcacattagaaggcactattgaggggtgtccaaaaatctttccgttaaaagcatttcaatggcaagcattggattcgttattgaatattacaggtctccgtggaattgaaggattatataattatttaagaaatttaaacaaataatgaagttcattaatcataaaaaaacagcatttgctattttaagtgccattttgggacctttttcccttaaatattgcattaattgcaaatcatccggaaacagttccagcgaatttcttctattgtattcaatattatggtggatttattttatcctttatgtatttactcacacgttcaccttgcattatattgaagtaattttttattggatagtattttggattgctgtaatactcatttcattatttataaaaaaaatacatgttatttcgtatttaaataaaaaatatgcgcatgatagaataaaaaagatattgatgtctgccagtaataatttttttacgttctggtttcctatagggagtcttgtctacttcgggtacggtcttgctagaactttcgatttacatttgatttattacatccttttatggtggttaatatggtttgtcatttggttcttcaaacaatctgttattttattttttaaaaatattatagaaagcatcatcacgtcattatattcacgaagaaaagaatctataataaattatatcattttcatattaatctatagttgcgcatatagcatcattttcataatgtcttgcatgaaatttttttcattattaattatagtaggaatctatataaataaaggaagttatttaaattttttgtaatggaaatttataaatcaaaaatgcctcaaccgccaatcaagtaaatttttaaaactaaatataaaatgaaatttctgacagcaaatttaccatatacaacattggaagaaaattactcataaaatatcatcatattaagtgaaaaagaatctactaaaaatatattttctgattacattggttattttaatcattccggcgactattttatttacaaaaagcaattgtgcccatattcaaataaaatcagaatccggagatattgttttttccgatgatgtatcatttaatcaaaatccgtattttttgaattttgattccgacaacatccgggattttctaggaaaaaatgatattggagatacggacaacataatcatttataataacgatcatgtcatttaccggggatataagggatatctgcggtctttgaacgattccaagcaatggggacttcccggaagattcattaaaaacggcaccgtattgacggacatgtttgccgtctccacttattacaatggacatgttttcaaagaaccgtattccaaacaatattttcttgaaatgtcatgcgtgaatgaaaacgatcctttccccatgtacggagaaaatcaataagaacggcattcgcatggaattttttatgttgccgttattaaaacactaaatgtaatttccaagagatttcaacacctgattttaaataactgcctgtccatattatcgtgcatgcttgcaccgcccgaaaagaggcttggcagggcaaatgagaatcggaaagaacaaatcgttttttcaacgttccctatcaaacaaaagtccggctttgccatcagcaagccggacttaaaaagagatggtaccccgtcacgggctcgaaccgtggacaaactgattaagagtcagctgctctaccaactgagctaacgaggcactggaatggcggcgttccttgcaggaacgaccggatggtaccccgtcacgggctcgaaccgtggacaaactgattaagagtcagctgctctaccaactgagctaacgaggcatgtatccggcagttccccgcgacaagctccaactctgaagatggagccactggtcggaattgaaccgacgacccacgcattacgaatgcgttgctctacccctgagctacagtggcatcgcgagaagcgcggaagcaagtaaccataagagcccccttttagcaagtcttttttgcaataagaccgtttttttacgccttgaatccggaatagaagccaagtacggcaggtgacagtagaagagcttgcataggagggggaaacatggtggagttcatgtcctcaaagagcttttctttccctacttatcatgaaggcatattacattttccagcaggcggacgaagaaacgatcagcaacattctggactggatgcgcaaccaggaacgcgccatttaccgcgccgccgtgcgtgaactcggcgccctgaaaaaattgcgcccggaattcatccagcgcaagccccttcaggagcaattctccttcatccagaaaatgctggcgtggaaacccagcaatgaaatcggggaccacctgctccaggtctggcttctgcgcaagcatcaggacatgctgattactttcctgaatacgctggacatcccccatgacggcaacggcattgtgaacgaactgccggaaacgctggacaaggaaaaactcgccaaggccgtggacgaattgtttgaaaaataccctgccggcgtagcgtccgtttacctccagatgttccagctccagacggaagacggctgggacgaactggccgaggtcctggcgaacgacccccgcgtcaccattcgctgacttttatcattctgctcccgtgaagggaatattggagccgctccggaaaagagcggctcttcttattttatattgactgtcagtcagtatactgctatccacggcagtaccccatgaaacgtttcctcctgctgccgacggcattcctgctgccgtgcgcctgcatttccgtcaatacggccgcccagacgctgaacgccggaaccgtttaccgcaactgggaactggatgaccgcgcctatgtgaaaaacggcttcgtttacatcaaagccgttcaatgcgatcagcgcaaggaaactccggtcatcggaccgcccatggcccagtcagacttcatttcacaaatggaggatattccgggaacggaaaagaccgtctttttgcagcttaacaagaaagaccttcccgatcccatagaatacaaagacctcctgagcatggtacttgaagagaatttcaccgttcctccccggttttccctgtatggagcgcatcaaattacccttccctacctgaacttgagcaggaaagaaaacgcttctcctaccgtagcagccgtaaagatcatcagcgctccctccacaggccggagaattctggcgggagcacagagctgcgtgattgacgcccccggtaccgtgattgccaatatccttcttattccggtcggcattgtcgttaccccctgcctgggcatgtataacctgtgctccggggaatgacgaaccaggccgttccaaacaaaaactcgcctccgcgttcgtgcccgcccttgcttcatccgcatgcgggcaatgtttttcccgcacgtgtacgtattccatgacccgggaaactccggatacctgccgcagccgccggctgccgtcatgaggggaccgtgtccggcggctccggacggaacgtccagccttcatccccgtgatacaccatcatccgagtcatgccgccgtcaatgaccaggttttccgcattgacgaagccggagcggcagaggaagaacacagcctgaacgatatcctccggcgttccaacgcgcccggaaggatgctggaggccgtcctccggggacaaggctccaaaggcccccgtgtcaatccagccggggctgatgctgttcacccggacgccgaggggcgcgaggctcatggcaagagcgtgggtcagggagatgagggctcccttggccgcgctgtagctttccgtatccttctgggacatggaagcgcgggtggaggcgatgttcacgatggaagccccgcgggaaaaatgatcacggaacaaaaggctgagcaggtagggggcagcaacgccctcgcgcagaacttcattaaagtcctcataagagcagccggaaagaataccgtggcgggtgatgcatgcattgtttaccaggacatccacccggccgaagtgctccaacactttttccgcaaaaaaacgcacgtcctcttccacccccgcatcacccgtcacgcagagatggccttctcccggcaattcttccagcagggaggccgtttcctcatgcttcacatccagcaccgccacgcgtgcgcctgctgcggcgcaagccttcgcaatggcgcggccaatgccgccggctccgcccgtcacgaccacggcacttccggaaaaatcaacatccatcatgggcagattgtcccgtgccgacgccggatgtcaataggcgctttccggcatgcagccctcagtgcgtgtacatcacatagcggtaaaagcccatggcgcgggaaagaagaggggaacgggtcacaacatccgtctccacgataagatgggccatggtactggaaacggccatttccgcttcctccgcacggcggctgatgcgttccagatccctggtttttacctggttcatgcggccggatttctgaaaatcatccacgacgtagcgcagccttttcagcctggccaccacttccaccaactccatggcgcgctggtccgccgttccggtatccttaatgccgcgcaggagatgctggattctttccaaacacaggcagaactcctccatggtcatgatgggatcagcccagaattcctgaaaatccaccagcctgggctgttccatctcaagccccaccactgctttctgcatggacggggaatcatacattctggccgtcaccagcttcaggagcgcccggaaagcgcgtttgcggttctcgtccgcccttctcctcatcttctccaacccgtcgtggcaatgccgttcaaaaccggggagccattctccgtactcctgctccagccgggtgatattgtccatctgttccctgaccatgcgcccctgaagggctacggacatggcataagcctccgcagccaccttgttgtcaatcccctccagcatgtccaccatggtggcgtactgctccagatacgctttcaggaacggcagtatcctgtcgttcaaatactgggccatccgttcgtccgtcaggctgagaccgtacttttccagatcatccctgatgacggcggaatcgtaatacttgagttcatgaagcttcagcatcgcctgcatcatccggtcgcgggccttgtccacgcgctcccggagaatggaatggaaggaggggtgaacctcccgggactcttcatgcacgcgcggattcagaatcatcagccgcccgcagttcatgttgtaaagcttcagcctgtccgtcaaccgccccagttccaccatcacggcctctcccgcagcccggtcctggatggaagcgaccagatccgtcatctgctccacgtccttcaggcgcagggaaagcagttcttcataggattccaccggggaaagcttttcagcctccttttcctccgcagccctttccccttcctccttgtccccgcaggaacacagcgccagcaaacacgcgcctcccaacagcggcaaattcaggaacagggaaaaacgggaactgagtttcatgagaaagcggcgttgatgagggaggctctggagcccggcccgcatcgtggcaacatggttaccgtaagaaagcgtccccaaagttcaaggccttttcatttcatccggaaaaaacattcccgcattcttgatgtgcggaaatattcttttaaatatcatgaacactctcccgaacccggaggtcacaccttattaccaactccatcctatccgccgtgattcttgacattcttcaatacggacacccccttttgagggaggaatgcagccccgtggttcatatcaacaaagaccttctttccttcctggacgacatgcaggaaaccctggcccaggggggcataggcctggccgctccgcaggtgggaagggccattcagatggtcaccatcaatattccgcccacggacgccactactacatggctggaagtggacggacgcccggccacgctggcgcaaatcatgcccttgaatttcatcaatcccgtcctccaccccttcggcaggaatgtgccgtaccgggaaggctgcctgagcatcaccaaggtgtatgcgaacgtcctgcgccgctcctgcgtgaaggccatcctgaccctgatggacggacgcaccgtgaccatcaaatgcaacgggctcctggcgcgctgcctgcagcacgaggtggaccatcttcagggaggcctgttcacggacctggtttccccggaggaccatgacaaggtggtgcggaggctccggctgacccatccggacgcctttgaggaagacgacgacagctacgcccgccgcatgaaggaggaacgccgcgcccgggcccgagatgcccaaacgccacccacgcccagaaaaaccgcttgacgctccgggagcaaatccgctcccgcctatcctgtgccttcttaaaaaatgccccggcgttccatctggaagccggggcattcgttatacggtaaaaaagcggataaatcagacaatccagtccagaaccaccttgccggacttgccggaattcatggcctcaaagccttcccggaattccgtgtagggcaggcggtgcgtaatgatgggcgctatattcaggccgctgcggatcatggaatccatcttgtgccaggtttcaaaaatttcacgcccgtaaatgcccttcattttcagccccttccagataaacttgttccattcgatgctggagccgtccggctggatgcccagcagggaaatgttggctccgttccgggaattgtcgatgatgtctttcaggcaggacggggcgccgctcatttccaggcacacgtcaaacccttccgtcatttccagctccttcattacgtcctccagtttttcacgggtcacgttcacggtacggtccgcgcccagcgtcttggccaggctcaggcggaaatcattgatgtccgtgataaccaccgtcttggctccggccttcttgcagacggcggcggccatgcagccgatgactcccgcgcccgtaatcaggacgtcttcccccaccatgtcccaggacaaggccgtatggacggcgttgcccagggggtcgaagatggaggcgatctccatcggaatgctcttgtggatgcgcaccacgttgtcctggggaatggagaggtactccgcaaagcagccgggcctgttcacgcccacgcccttcgtgttcgggcacaggtgcttctggccggaacggcagctccggcagtggccgcagacgatgtggccttctccggaaacgatctccccgggcttgtattccgtcacggaagagcctacggcttcaatcacgccgcagaactcatggcccacgtgcatccccacgggaatggtctgctgggcccacttgtcccagttccagatatgaaggtccgtgccgcaaatggctgttttatgaattttaatcaggacatcgttcgggccgacttccggcatgggaacatccatcagttccaaaccggggcctgcctgcgtttttacaagagctttcatgcccctcattcatgctctttttcccctgcggcggcaagctcaaaattcatttccggagcactggaaaacaggggccggaacagggcggcacgcccttccccgcccgtgccgctccggcacggaaaaaccacggaaaggattctccggaaaggcattcctgttcaatcaacaattcagacacacacgcattttgccctttccaatattgccgaaccatgataccaagacatacggttcacccgttgaacgctttactccatttacagaatcatggcgaaatcattcttacccaccatttttgaacatccgtatgaaatcgaccccaaatacggaaaaagcgtagcgtacttctccatggaatacgccattgacaattcattcaaaatctattccggcggcctgggctacctgtccggctcccacatgcgcagcgcccatgacctgcgccagaacctcgtaggcgtcggcatcctgtggagctacggctactacaaccagatccgggcggaagacggctccatggccacgcagtacatgcgcaagaactacccgttcctggaagaccacaacatcaaattcctcatccacgtctgcggcgcgcccgtctgggtgaaagcctacttcctgaatccggaaactttcggcaccgcccccatgttcttcctttccacggacctggaggaaaacgacgaggaaagccgcaacatctcccgccgcctgtacgacgccaacggcttcacccgcatcgcccagtacgtgctgctcggcaagggcggcgcccgtctctttgacgagctgggcattgaaccggaaatctaccacctgaatgaagcccacggcctggccgccgccttccatgtgcttgccaagaccggcagcgtggaggaagtgcgcaagcgcttcgtcttcactacgcacaccccggaggaagccggcaatgaaaagatggacgtgaacaccatgaacacgttctccttcttcgacgggctttccatggaacaggtgcgcgccgccgtaggcctgacggacaacacgttcaactacacgctggccgccctgcgcctttcccacatcgccaacggcgtttccaagctccacggcgaagtttcccgccagatgtggaaggactatgaaggcgtgtgccccatcatccacatcacgaacgcccagaaccagaaatactggcaggacccggaactggcggaagccttccaggcccgcaacaaggaggccttcatccgccgcaagcgcgccctgaagaaagccctcttccgcatggtgggggaacagacgggccgcgtctttgacccgaactgcctcaccatcgtctgggcgcgccgctttgcggcctacaagcgtccggacctggtcactggcaatcccaccatgtttgaacgcatgctccagcgcaccaactatccggtgcagttcatctgggcaggcaaaccctacccgatggaccacggcgccattgaaatcttcaaccgcctgaacgacatgacggccaagtatccccgttccgccgtgctcaccggctatgaactgggcctgagccgctacctgaagaacggctccgacgtgtggctgaacaaccccgtagtcacccgggaggcctccggcacctccggcatgtccgccgccatgaacggctccatctccgtctccaccaatgacggctggatctgtgaattcgccaaggacggggaaaactgcttcgtcattccggaagcggctccccacctctccccggaagcccgcgaccgctccgaccgcgacaacttctacaacatcctggacgacaagattctgccgctttactacgatcacaacgacaagtggatggacattgtcttcaatgcgatgacggatatctaccccgagtttgactccgaccgcatggcggaccagtactacacggagatgtacaacagctaggaaaaacttctttcccgctttcatgcaacggccgcccttccctgtggaaagggcggccgttcctgttcaagcctgtttcaaaaatccgtggaacggagctgaacgccccttaggaaggtgcagactatttgggttcctcctcttcaccgccggattcagccgcggtcttgtccgcagggcgcttgcggcggtgcgcgaaaacgttctcctgctgccacacgcgggaaaaggcggacgtgatgagccccgtggaaatggcgatgatggacacggcaatgaacatgatcaccccggtaaaaatgcgtcccatgggcgtaataggcaccagatcgccgtaccccaccgtgctcagggtctccacggcaaaccacagggcgtcaaaaaaggagcggaacttctccggctgggcatcgtgctccgcaatgtaaatgcccagggacgtgacgtacagcataaacaggatcacggaaaagaacaggaagaactcatcccggatcaggtaaaaggcctttttaaagctggctgcggtttgattaaaccgggccagcttgaaaatggccagcacacggacaatccgcagggaataaagaatctgccagtccgccccgaaaaacatgcccaggaacggcacgcagacaatgaaatccagaatgcccatgccgctgaagatataagccttccgcggcttggcgcacagcacccgcaggatatactcaaacacaaagaaatagctgatccagtaattcaccttggccgcaatccggcctaccagcggatgaacgtccggaatggcattcagcgtgtacagcatgaaccataccagaatcagcaccctgacgacgttctcccaggggccgaaattggctgcgccttgcttggtgcgggtaatcaggggcatggcgggaatcaggaatgaagggcggctttccactcgtcagccttgaagccgacgcaaatcctcccgttggtgattagaatggggcgtttgaccagcataccgttggtagccagcagagccacctgctcctccaggctcatgccgggaagcctgtctttcaaattcatgctcttgtacagcaggccgctggtattgaaaaacctcttggacggcaggccgctctcttcaatccaggtccggagctcctccgccgtggggttttgctccacaatgtggcggtcctcataggaaacgccctgttcatcaagccattttttggctttctggcaagtcgtgcacttgggatattcaataaacaaggaagacatacctgcacgctagccccgtaaacacaccgggtcaagcggccagcacagccatcctgccgtcatgacttgattggaacacgccgggcgcctccgccatgaaaggcggcaaaccctgaaagaaaccgcaacaggaaggccccggcgctccggaacgtcaaagcaccatggcgcttcccagttgcgcgatggaaacgggattgggctgccgctccctgagcgcctccgccagggcgcgggaggccttctcctccccgtgcgccagaatgatatttctcttgggccccccggtcttgtcaaaatattccagcagctctccatggtccgcatggccggaaaaggagtccatctcccgtatcctggcccggacagtgtactgcttgcccaggatgggaacctccttccacccgtccatgatcttgcggcccagcgtatgctccgcgcaatagcccacaaaaaggaccgtattcttcgggttgccgatgttgttcgccagatggtgaaggatgcgcccggcctcacacatgccggaggcggagatgatgatggcctgcccgttcatcttgttcagatcctgggattcccccacggaacggataagccgcagctgttcaaaacagaacggatccttttcccggaacagaaaatcatacacctccttgttgaagcactccggatgaatgcggaaaatctccgtggcgcccacggccatggggctgtccacatacacgggcagcaaaggcagcgaaccttcatgataagccctgttcagcaggtaaagaagctgctgggtgcgctctaccgcaaaggcgggaatgtaaacgcggccgcccaggtccagggcctccctgatcaccctgcagaaggcttcgtcatcacgggagggggcctcatggaaacggccgccgtaggtgctctccatcagcagaatgtccacatccggaacgggcacgggatcacgcaggagttcattatcccccctgcccacgtctccggaaaacaggaagcgcttcttccgcccgtcttcccggtcctcaatatccaggcacacctgcgcggcgcccagaatatggcccgcatcataaaacgtgagcgtcacgcccggaacgacggggatggagcgttcatacccgatattcacgaactggcgcatgcaccgttccgcatcctgttcggaataagtgggataaatctccggctgctgaatgccccggcgcttgttcatcttattaatgaacgcgcaatcgtgctcctggatgcgggcggcgtccgccagcatgagctggcagagatcccgggttgcaaacgtactgtaaatattcccctgaaacccctgcttcaccagattgggaagattgccggaatggtctatgtgcgcgtgggaaagaaccgccgcgtccacctccgccggagaaaaatagggaaaatccttgttgatgtgccaggcttcctcacgccgcccctggtacatgccgcaatccagaagaatcctgctcccgttcacctccagcaaatgctgggaccccgtcgtcgtacccgccgcgccgcaaaaatgaattttcattaatacatgtgtacaacaagcccccggccaacgcaagaaatcagtgccttccgggatgatgaatttcatgtgtccgtgctcacaatttcaagttcccggcattggctctcacccatcacaattcttcatgcccacgctgcacgttttcctaaaacattcttacaccgcacaggggaaccccagactgggaaaagcaaaaagctgttctctcaattctgagagaacagcctgtcaacaatgctattggctcctcatgaaagtccaagagcaaagacaatcaaaaatggaagaaaccataaaatagataaagccacagctataataaaatccatcttctttttatcttcaataagtccacataccccccacaacaagctaagaataggacctccaaccattatcaacccaaaaaacatcatggccaattcagtcaagttgctcaaatccatccattttggaaaaccataaaaacggactcccacgctcgttccgcacaaaagcaatgtaatgatccatgatgctagtacaggatagtatgattttatcttcatttttaataggatgcttttaaacaatcacaaagggcatttttgatctggttgcctctttctcttaaatcttcgtcattcaccccaggatctgtgacataatctggatccttctgcttttgtgctcttaccttttttagataatcatcaactccttgacgaaaagcgtttgcatgaatctgatcgcgctgtaattttctaaagatttatcttcattacgtggaaaaactacaccattttccgcataggtcaaatcatctatgacatgactcaagatgatagctgaaaattctatagctccttcatctgtcaaaattcgttgcttcacgtctcctggttgtatggctcgacgcactccagaacatacctgctattctgcaaagaattctggctagcatatcttggcaccgtggttacataaatattaaaacacccatctctctttgtatataacatatcactcataatcccaaccttgttgatgcactagatcgcctcacgcctctcctgatacatgtcacgtgttctccctaaaaatctcacaatgccgagggtgaacaccagactaaggaaaagcaaaaagtctgttctctcaaaatgagagaacagactgtcaacaatgttgtttgcttttcaaaaaagatcaaacgaaaaaatcagagaggcaatattctcattcctctacgaggcattcctatgataggctgatcgcattcccctttctcatataaaaaaataaaatcatttgtcgttttaacttcaagaccgtttttccagtttatatattcctgggaatccgagtatgctacatacgtccaaccctgataataaaatcttatattgacgtgattatctaaaaaaatatcacctatatcaagaaaaatgcccaatcctggtattatgctcaaataccaaggcgtttccttctcaatagatattttaatttcatcaatttcatacttttcaattgacctatagtacaatatcaaggataacaaaagttgcaaaatataaacaaaaataattatctttgtaatattgattatttttcttggcaaaatctttttctccatgtatcagctattttacttttatttttattccatgtatctttgtcaaaataatgtgatttaaaaactttagacaaatcctttgcggccccagcagcagctctatcagattccacctctgcttcacattcctgctgtctcgcaccagaacgaattaacgattctgcaaaatccattaattgggcagctcttgcacctaattgtccttcgtgaagcgcccatgcaaaatgacgagcattattggcaccattcgcggccatttccggcttaaatccaacatttttttgatttctcggcgtattcccatgcattaaccttttgagagtagcatctttatctccattaaataaattgtcaacattattaaataatttacttcctgttttcatttctttattcaaatctttagccaatttttctgaaacttgattgacaaaatctcctttctcacttccatctgacaaagcttgaaggaaatcgttgtaattgttcactgatggatcatttgccaattgttcaagtgctttcgcaaatttttcacaaaaacactcatcgacctcaccatcaccatttttatcatattttctatcaatattctgtaaaatatcatctgccttaggatatgatggctgagaaggcgtttgcgaagatcctaatgcagagggaggtaatgtagagccattacacaaatatggtttatagtccggagacaaccccaaaatgtcagtataccctgaaacaaaattatcattaaacacatattcgttgataacacctgatactgaaacaaaatcccgattaatccatcgaccatccagagggttgagatagcggtagttgtaataaaccatccccagttcatcgtcatgatattccgacgagaaacggaagggattgaccagggccatgtctccttcagctttgataacggctccgtagggagcgtattcatacaaggcacggcgcccggccttggaaccgaagagagcaatcgcattcttcatccggtcgtgcgtgaagtacaggttttccggattactgcccattccatcatagttccgcatggcgagaatacgcgtagctgtggtctctacaggatcccacaggtaggtttttttcaaaatgggtaaaaccgtttcatccgcgtttgcggcatccagttctgcgatttgcagatagtccttgtaaatgaaacgtttccgggaaacgagattttctccgttgtatacagatttttccacacgccggtgcaggtagtcgtataaacattcaatgcgcatctcaccctgtacaaattcaatggcctggttgaacgcgttgtaagtaacgctccattccccggtagccgttttcacctttgtctggttaccttccaaatcatattccggcaggaaaggagtttgcgttccttcaataatagatacatactgattaagttcgttgctggcatacacagaagaatctgcggttccttcccggccagttatccggttgcccatgttgtcatagacatagctgtatgttccaccccggctcattgcgtcggcaacaagctctccccgttcattatacgtataattatgtgtcaaatcgggattgggagtgttgaagtaatccatttttgtcatgggacgtcccaggatatcataggtataatcaacctttgcgggataattctgccctccgggccgaagataatctactttaatgagcaaattcctcttttcttcccgcgtataccatcttttgagggtattagggtaggaaagcgtctccaatagcccatggttaacattgtaaccgtaattaaagggagcttccaaaccatccatggagacattccccagccttcccttggtatcatatccataggaaacggcctgtacggtttcctccccgcaaagaaggctgtagcctgcagcacgccccagagagtcgcgagtattagagaggacacaggaaacaagtccttgcatcttttccgcctccagttcattgtactggttgtatataaattcccgtgtcccggagccgtccgaaaccgaaacaggcatgccgaggtagttgtaagaataagtgaccggaggcgtttgcgtagtagaggaatcgtcacagatgacagagagaagttccccggtgagcggagcataagtccttattgctgcgagggaacggggattgatactcctctccagccggttcatggagtcatactcatagttggcggaagttccatcagcataggtcttgctaagaagcaaaccggtggacgcgtcataacgccaagtagtcgtatcgccatccgtacgttccgtgggatctgaaacaatggcctcttccccagcccggaaagtggtcagggaaaccacgttgtccgcgtcatcataggcataaagggctggctggacacctgtaccgtattcagcaattttacgtccccggcagtcataggagaagcagaccgtatttcccaaggcatccgtcacaaacgagggttttcctgtggctggatcataggatgtcgtggtaacaccacccatggcgttcgttaccttgacggagcgcccggcgacatcctgctccaagatggtagcattgccgcggacatccgtattaatcagtgttaaaccatgttccgtataaatgcgggcgtgggtggtcgcgacgcctgccagatctgttcctgaaatcaggaaaccatctatcaaaacatcctccgccatggtattggaagctggagtttgccgtttgataattcgtttggcggatgttgaatattccgtccatgtaacgccttcattaccccgtgtatccctaatcacggtttttccggccagggtggcatgagttgatgaaatgagactgatttccgaagtcctgacaggggccccttccggcgtataaatggtagaggtctctttcagatagactccatctgatccatcctcaaaagagacagcccattccgtaatgcgggagttgagttttgtaggggaatcatccagcttgacagtttctctgatgaggtttcccatcgtatcatagtcataaagaatgggggccaaaccaaccgtctgctcctgtgttttttgccccttttcattgtagacatagtcggtaacaatccatcctccttccgtattgggaagttctttcttcaccgtctgcccgaatccgtccacggtttcccgggagagtacgatgccagcgctaccttccggggaaggggttgaaatggtggtgcggactccgttcttgagagcctccaccatataaatcaagtgccgctgtcctgttcctgattgctccagaagagtgccgtccgcgtgcttccgtgtgataagagtagctcctgtgggagttgtttcagttgtggtcaatccgtcttcactataagagtaggttgttacgcgccccagtttatccgtgtaggaaacacgacgtcccagcaaatcatagctcgtcctggtgatggttgtcattggaccgatgtctacacgagtttcaagaatacggtccatcgcatccctggtataggaggtgatcatttccggagtagtttctgttgcggagcggataacttctacaagctgccgggccgtattgtaggaataggtagtgagaataccgtcttcatcccgttcccacagaggaccgcagcacatcatttcacgttctgtaatacggccattggcgcgcgtgcgtttaatccagcggttttcacagtcgtattcgtaatccatggcttcaaccagcttccaagtaccgttagaaagcagaacgtaatcttctatccgcatgtcatttccctgagcagagacataacgaatttgacgcgtgctttgaccatgaacagctttccccgatacttgcgtttctttcgtaactttgtaaagagatccgtaagagttattgggctcataggtataagctgtctgtactccattgatatcccggtggaatttaattcgtccttgggcatggggattgggagcggtgcccagccaggtttctgtcgcctcaaactgtgttttaccagacccaagagccgtggtccgtttttctacgcggcgcacatgattgactgtggagtatttgtaattgatacgccggtactgggtagcatttccttctttaacaagggcgatgcgttgatggtcaatgtccgaatcatagaaatccccatccttataatacgtatagatagccttgcgagtgcctccggcccatggctcatacgagacagtggggcggctgtgcgtatcataaccgctagaccagatattgtcttttgtggaggcgttcttatccactacattgccgcgcccggcatcgtcataggaataggtagtcttccgggagatgggactgccgtaagccatggttttgtcatttctctgcgttccttcatccgtcttagagaaagtttctgaagtgcatgaaactacctctccctccattcctctcttgacttttgcagtaagcctatagcggttgcctccaagttcttctcgctctaccagtgtgacaatctcgtcttctccggtgccttttgacatgctccaggcgccaccagcctgccaccaagataccacataagggggacgaccagccgcccgctctgtaacaatgatgcggtcacgttcttcgttggggccaatatcaaaggatttgaaaggttcccctgtgagctgatacaaaccggtggaattgtctttaactcctacctggtttggaagatacagggcgatggagtaaccattttcactaatattttcgatatttgccaccccatcccacaagttccatatctgacgcagactcccgtcttcagcttttacaatatcaaggtaacgggcaaattcggaagaagaaatctgtttaccggaccaagtgttataactggaaggcattcctgaaacagttgaataaatagtggaacttttggtatgtgttttaaattctatgtgggaggtttctcccgaacttccgtattgaacccgggcggaggtggttgtaccggtagaaactccggcgccgaagatggaattgccgtctcctccgatgaggtaatgatgtttgcttgttccggagacaactttcaccatggtgttgggctggccgatatagctggagccggatggtttctccagacgacttgccatcggatgattgtaggcaagagagtggattgaccaagccgtttctgaaaaatttttggccgtaatttcaagcatgcctcccggtacgcctcccatgcctcggaaggtaccgaaattcgcctgccaaagcatgttgttcttgctaatggtagctgtgatatttttaccgccggaagaactggcccattctgccgagcggattttccgagaagcaggggccccttcctctccgcccggctgcgttgtattttcgttctgagctcctttctggcaatcgcagtcatctcgctcacaatctccggcattgtcttcattgtcttccggaacagctttgcccggactggcattcaggctaaattccaggaaggctttgttagcgttctttttatagtcaatattatcataacttaacgtagcgcaataaaaaccgggaggaagtttcccggaagcagaatcactctgtccggagctccccccattcggcccctgctcaggcaagctgattttcaaaggacccatggaaaattcgcctaaatcgtcgacgctcaagtctgctgtaacttgaatgggttccctggtctcccctgatggatcaccaactttaactatccagtaaaaatccttgtggaaaccttcagaaggagggccctctttaatggattcatgaatattttgaggttcaccagtgcgcgtacgggtagcgggaatgtaatatttaaaaccaggacattcctcagcaagaatcatgttggaggaatcggatcgggatagggaatttccattatccctgctgttatcgaatgtttgttcgttcatcgatgttgttttgttagatattgataaacaaaatattgagacttgcatcacgatagtatgcgtattctcaataagtattctctgtagcatacttctttttcaagaatcaacggaaagagttgccgggtaattcatgcctgcaatggcaggagaataaaattcgcattgcgttattttcgcaatctcattttataagaggaattcttttcttattccgcttcatggttcacgttccagcagaaaaatccatcccccttctctttcgcatatcagtaaaataaataaatcccgcgtatgattcatcaagaatttgatcaagtggaatctacgacaaagaatattccatggaatcaaccacggaatatcggaaaagaaggctgtctgctaccaattgaaggtaacaggaaaaagttaacaaaaaaggcggggaaatccccgcctgctcaagttttttatcagatgaaaacctacttactctcctttttggtttccgccggcttctccgcttccacgtcaatgggctgggaaagctcgggagaggggcgggactccggcttggaagcgggagtatcgctcatggtttccttctccgtcttcaacagctcctcttcaaactcggacttggccttcttgaactctcccaggctcttgcccagaccgcgggcgaattcggggagtttcttagcgccgaacagcaggaagacaatcaccagaatggcgataatctccggcgttcccagtccaaaaatagctaacgtgttcatcatggagtgctacggtctttttaacagatttttttcatgccggatacctcataatacgcttcatgcgtcatcagaggattgctgttcctgtttttgctgctccgcaagccttctgacggcaaaacggtggaaacgccaaacgaccaggaagatcaccagggaaagcgccgccatgctgccccacagcagccagaacgcggcggaagccgccccttcgtcccccagttctccggcctggttccaataataataggacagcaccggattccaggacatggaactgcccggcagaagatggaggcgcgccatgcggttcatggccggcagataagccgcctgggcggatgctttcatcagggaatccccctgcgcatcatcgccccgcgtataatacacctgggccagcatatacatggccttggggtcccccgttgcgtctgccgcgcgccgcagcagcctgtaggcttcatccgcatccagttccccgcccttcccgttctggagcaattccgcggccttcagggcggcaggggggtaaccgatggcagcggcttcacggtacagggccagcgcacgcgctgcctgttctccggaaggagagccttccatcagcatgtccgccagggcagccatgctgtacggatccttccattccgcgcctttttcaaaccagttgagggctttttcccggtcagggggcatatacttaccgtcccggtacatcatgcccagttccattacggcgcccagatccttccggccagccgccttttcaaaccattccacggccttggccgcatcctgcgggacgcccagaccatcccggtacttgaacgccagaagcccctgcgccgtcaggttgccgctttccgcagcatgaaggaggtacggaaccgacttttccggagagctgtccggaaccagcttccgttcataaacaagggccgcccacaacgccgccttggaatcgccggcgtcagcctctttcctccatgtttggagggctttttcataatagcgggccgccatttcctcattcttcggaccgcctgttcccttggaagccattacagccacctggtactgtgccgcggcattgccgccgtcagcggcgcgggcaaaccagtaccgggccttttcaagattcctggggtacaggcggctgcctgtataaaacagcttgcccaaatccagcatggaatccacgtccccgccattggcctccttctccgccagggaaacgtattcagacatccatttggacgtctccggggcattcccctccacatcataatgcactgccagctcccgggcggcagctttatccccgttatgggctttctcctgaagactggacaggtacgtcccaaaatccccctcaccggcaggagccggggagggagcatcctgagacgcatgaagcggaggctgaacgaggcacagcccacacaatccggcaaggagccaccatttgcactgcttcttcataccggaacaagtcaatcattaacggcccctgtttccgcgggagaaaccgccggaagatctgccgccaaagcccggtttgcgaaaaccgccttcacgacgctggaagcctccctcgcggcggtctcctccgaaaccgccttcgcggcgtttaaagcctccttcgcggcggtctcctccaaatccaccttcacggcgctggaaacctccttcacggcgatctccgccaaatccaccttcacggcgctggaagcctccctcgcggcggtctccgccgaagccaccttcacggcgctggaagcctccctcgcggcggtctccaccgaagccaccttcacggcgctggaagcctccctcgcggcggtctccaccgaagccaccttcgcggcgtctgaaacctccctcgcgacggtctcctccaaatccgccttcacggcgctggaagcctccttcgcggcggtctcctctgaaacccccttcacgacgctggaagcctccctcgcggcgattgccaccgaagccgccttcccggcgctggaaaccgccttcgcggcgtccacggaaaccatcttcccggcgttcacgggaacggaatccggaatcatcccgaaggtcttcaccctccttgatttcatcctcgtcctctgtatccgcaaagcgggttttcatttccggagtaggttcataagaatccccggcttcaaaatcttccggattaaatacataaccttcatcagaatcagcgttcttcccgctctgttcgcccttggcggaagtcccggcgacaagctgggaagcacccaggtatttgcgctggcggggaggattcttcagcagcagggctacatccgcatcatccaggaatctccagcttccgggttccagatcgcccccccacagggaaccgatgcgcacgcgtaccagcttgcggacgcggaggcccaggcactggaacatctggcgcacctggcgcttcagcccctgttccagaacaacacaggcgcggcgcgcggaagcgcggcagacgtacttggccttggcattgccttccggaatgcggactccgcgcaggaactgcatcagcacggaattgtcaaaattctgatctaccgtcacccagtattccttttcaatcccgccggtggggtgggaaagggtttgggtcaattcccccttgttcgtcatgatcaggaggccttcggaatcggcatccagccgtcccacgtaattcagatggcgcaggcgcggcggcagcaggtcgtaaacagtgcctatggccccctgggcttcacggctgcatacgtacccgcgcggcttgttcaacagcaccacgacttcctccatgggagtcatgtggcggccgtccactttcacgaaatccttctccgtcaccctcattccgggcgtatcaataaccttcccgttcacttccacgcgtccttcctcaatcagtctgtcagccacccggcgggaatcaatgccgcaggatgcaaggaatttattaatgcggatacctccgttttcttcggagccatgttgttcttcactcatattggtataatgtccgctatctcagcggatggttttgtattgtttgtattacggcaattcgcgcgccccaaaaagagggatggccttctttgccggaagaaaaaagcctctcggttcatagacatccgagaggcttcctgtattaggaaaatgacttgccgtgcatgactccgccgggaaactctccggagggggtaaaagcaggcttaagcttcatgcttggtcttcggcaggccgagagggctttgacccttcttccattcgccgcgttccttgagaagcttgacgcgttcaaaacgcttcaggacggaacgcttgccgcctacggtaccggttgctttgaggctggaatgcttggacatgatcttgtgttttgtaaaaggttcagaaaggtgcttcacaccaccctcacggtggcaggcgaggtcttataacggaaggccccggtcttggcaagagaaatttgacgcggcgctcaaatatctcattccacggcatcctccggatgcgccttcagccacgccctccataaatccggacggttcagccgcgtacgctccagagatttcccgtgcttccacttttcaatggcgggatggttgccgcccagcaggatgtccggaacggccatcccgcggaacacgttcggcttggtataggcgggcgcctccagaaggccgttggaaaaagattcctccacggaagagcgttcatcccccagcacaccgggaatcaggcgcgctacggcatcaatcaccaccacggcggcaatcgccccgttcgtgagaatataatccccgatggacagctccacatccaccagctcttccaccacgcggtggtccaccccctcataatgcccgcagagaatgatgaggtggccgccggatgcggccagctccccggccagggactgattgaaggtgcggccctgcggggtcatcagcaccacgcgcgtttccggcctgcggagttcctccacggcggcaaaaatgggttccggtttcaacagcatgccctgcccgcccccgcagaggtagtcgtccgtcttgcggtgcttgtccaccgtccagtcacggatgttatggcagcgcacctccaccagccccttttcacgggccttccccaggatgctgccgcccaggggggcttccaccatctccgggaacagggagagaacgtcaataatcagtccagcggccataagaagggaaggaaaacgtcagcgttcgcgcttgtggccgcgcagcatggcctcaatgaaggggtccaggttgccgtccatcacgtcctgaatgttgccggattccacgcccgtgcgcaaatccttcaccatctggtaaggctggaagacgtaggaacggatctggttgccccagccgatgtcccccttttcactgtactggcggtcggcttccgcctgcttcttgtcttcctcaatctggtacagcttggcgcgcagcatgttcatggcctcctccttgttgcgaagctggctgcgttcgttctggcaggctacgatcactccggagggaatgtgcgtgatgcgcacggcggtttccaccttgttcacgttctggccgcccttgccgccggaacggtaggtatccaccttcaaatccttgtccagaatctcaatactgatggaatcggaaacctccggcgtagcgtccagggaggcgaaggaagtgtgccgcttaccggcggaatcaaagggagaaatgcgcaccaggcggtggatgccgcgttcattcttcaaataaccgtaagcatactctccatccaccttcaaggttacggaacggatgccggcgtcatcgccatccgtgctttccagataagtcacggaaaagccgcggcgctcacaccagcggatatacatgcgcatcagcatggacgcccagtcacaggcttccgtgccgcctgccccggcgtgaatggtcacataacaggaagcctggtcctgcgggccgttcaacaaggtcagcagctcaaaatccgccagggacttctgccatttggcaaactcctccacggcctcccggcccaggtcgtcgtcatccgcctcctgggccaattcaatggtagcgtcaatatcctccagacgggatttcaatgcggaaaacgcctccatcctgtgtttcaggggattcacttccgccatcagcgcccgcgcggcattctggtcatcccagaaatccggagcgctcatgcgttcgtccaattcggccactcgttgttgaatgccgtccaggtcaaagatagctcccgagctcggaaagacggctgtgcaaaacagccgtgtcgagcgccgagagatctgcagcgatatggggatccatgcgcgggaacctatcacgaatcacctgaacggaaaagggcaaaataccgattctcccggtcattcttttttcaaggaaaatttctcatggagatactccataagattctggcaaggaacggaagatccttgttcccggcagtgcggctatcggaaaaagcaggggaaaggacatatcccacagcctgaacgaatcacagggccgtgtatggaggtatcccgtccttcccggatagccggcacccaaagcgcaatggaggcttggtccaaatcccgcccgccaccggaactaaaacctatccggcagaatcttccccggccccctcaaaaggccgtatccggcaggacttgagcttttcaatctcctcaaaagtcatgatatgctcaatctggcaggcaacctcattggcgcgttcttccggaagagccagttcctccctcaggaaatcaaacaaaataccgtggctgacaatgatttttcccgcgattctgcggccctggggcgtcagcttgacgggagcatactgcgtgtactccaccagccccatgtccgccagctgcttgacggcagacgtgacggaaggcatcttcaccttaagcatctctgcaatatcccgcacctgggccgttccgctcttttcagacagcagcccgatggcctccagataatcctcattgctcttggtcagctccaacatggtataagagaacagttaatcccttaggtgaaactaactcaagactttttccatccttatttggaatgagaaaaaaaaccaccgcgaatatcactattcgcggcggttaaatcaatcagtgaattacgtagataagcttacttctcttcagaagggctccattcttcgttttcacgggtagccaggttgaaggcgtgttccaggcccaccatgtcgctgctcgggcggagagcttcaaaggaggcggtttcacggcggagctgttcggtgtcgtaattgacggccttgatggaaaggccgatgcggcgttcgatgctgtccaccttgatcacgcgggcggtgatttcatcacccaccttgatcacgtccttcacgcgttccacgtggtcttcgctaagctgggagatgtgaatcaggccgtcgatgtccccgttcaggttcacaaaggcgccgaagctggcgatcttggccacttggccggtcaccatgtcgcccaccttgaagcggtcgttgatggattcccacggatcagactcaagctgcttgatgccaagggagacacgctggtcttccttcttgatttccagaacgatggcttccacttcgtcgcccttcttgaggacttcggaggggtggttgattttgcgggtccagctcatgtcggacacgtggatcatgccgtcgatgccttcttccaggcccacaaaggcaccgtagggagtaaggttgcggacctggcccttgataacggtgccgatcgggaagcgggattcgatatccgcccagggattgtcttccagctggcgaacgccgagggagattttctgttccttcacggaaatggaaagcaccacggcttcgatttcctggtccagcttcagcacgtcgctcggacgggtgattctcttgacccaggacagttcggaaacgtgcaccaggccttccacgcccttttccagctccacgaaggcgccgtaaggcagaagcttggtcacgcggcccttgacatgggaattgatcgggtacttgcgttcgatgtccgcccagggattgtccgtcatctgcttcaggcccagggaaacgcgttccttttcgcggtccacttccagaatcacgacttccagggactggccgatgtggagcatttcgctcgggtggttcacgcggccccagctcatatccgtgatatgaagcaggccgtccatgccgcggaggtcgacaaaggcgccgaagtccgtgatgttcttcacgaggccttccaccttgtcgccttccttgacggtttcaaggaagcgctggcgctggtcggcgcgttcggcttcgatcacttcgcggcgggaaaggacgatgttcttgcggtcgtcgttcaccttgacgatcttgaattcgtaaaccttgcccacgtattcgttcaggtcgcgcgggggaatgatatccacctgggaaccgggaaggaaggcttccacgccaacgttgaccatgaggccacccttgacgacgctcttcactttacccttgaccaggccgccatcgcggtacacgcccacgatcttatcccagttctgcttatgggcggccttttccttggaaaggacgacgatgccttcgtcgttttcgaggcgttccagaaggacctcgatctggtcccccacttcgatttcctcgtcttcaaactcggaaatggaaatagcgccttcggacttgtagccgatgtccaccaaaacgacttggggacggatttcctggatggttccggtaacgatggaaccttcacgcaattcgcggaacttgctgtcaataagttccgccagttcagttgtgctcatttaaatggttgatgagttagtattgccgatttttctcatggccccttattggccggcgggcaatcggggcgccttcccccgccgggcgaaaaatcggttgccttcaataccagtttcacgcaagaactcaaggcttttcttgaaaaactccttccgatttttttccggccctgcggcgccctgacggatggcggcaaaaacaagcgcacaaaaaccttgtagccctccctccccatgttaaattccggctaatgggaaaatgcggaacatccgcatccatcaaccactcccgccgcaaagccatgaaaaaaatcatcctgtccctcctcgctgcggggctgtccggaacagccctccttcacgccgcggaacccgtcaaactggaccagccggacctggaacggggggcgccaattatgaaagccctgtccgaccgccaatccatccggagcttttctgaaaaaacgctctcccaaaaagatctgtcagacctgctctgggccgccaacggaatcaaccgccaggaatccggcaagcgtaccgccccgtccgccatgaaccggcaggacgtcaaaatttacgtatgcacgaaagacgcctcctacctctatgaccacaaggcccacgccatggtccccgtaagcgacggggacgcgcgcccggcggacgcgcccgtttgcctggttcttgtgacggacacggcggaaccctgggcagccatggacgccggcatcgtctcccagaacatctccctgttctgctccggaacgggactggctacctacccacgggccagcatgaacaaggaggccctggcaaaagccctgaaactggcctctccccaaacgcccatgctctgccatccggtagggtataaaaaataacaacttccggttccatcctttggatgggccggaaaaggggccatccggaaccggaaatgaattccgcaacaggcggaatcagggctccggcagaatatccacgtaaatgccgggagagctcccttcaatgggcatcgcgcctaccgtccgggcataaaaatcggccggccctaccccgccgatgatgccgtaggcatgccccatctcacggagtgcgttcaatgcggaaaccagcaaaaccttgcccacgccgctcttgcgcgcctcctccgcaacccccatggggccaagaaaaccgcgcgccgtcacgtcatagcaggcaaagccgagaatcttcttctcccgtgtggcaatataacaggaaatgggctggcggctgaatgcagtcttcgtttcactcacccacttgggagaaaaattccggcctacccatccagccaccaaatggcgttcataagcccccggccgccggatcaaaatgccgtccttctccagcttccgcagctcttcttcaatatcgggcaaatcatacagccgtaccagcatatccatcataaccccggcaccgtatcacaaccaagtgccgcggcgaataaaaaaaactggacaaaccctcctttcaaccgtagacttcgccgcaccacaaacaacgagctgtagcgcaggctggtagcgcgcttcgttcgggacgaagaggtcgcaggttcgaatcctgtcagctcgaccactttttaaaagccgccttcgggcggtttttttgttgtttgaatactgcttttcaaacaatttcacaccttagaaaccctattttcctgttattttacactaaggtgaatatagcccactaagtttaataaatggtgccatactgattgattttgaatccataaagagtatcaaggacacaaaatcacatgagcaaacctctcagatttaccatcttcaaaatgcaacgttggggcaaaattctctacaggatcagaataccgaccagatttgcagcatcaggggaaaaaaccgacttgtactacaaaacaagagctgaggctgaagaagaacaagccctgctcagagaaaagttgccttgccgcgttctcgcaaagagagcaagcattctttgtttttaaaaaaaggtttctgaacatcgtgtctggagaaggaacttacaggtttccctctcctggaatccctcattaaacctacccttcacgatccagcctcatttgagcacgtttcattaacctgtaaattcaaaaagggtaagaaaaaacagaccttggacaaatcatactccaagaagaatttcgaggaaaaaatgctcttggcaataaggcaatcaactacgccgttgtcgtctatgattacgacaaagatactttccttgacgaaaaagcaacaacaaacacagagccatctttccaagggactttaattgaagacgtgcaaagacaccaagttgaaaatccacaataaaaaagccccgctcatatttcatgagcggggctgtcccaatttttcaaattcacctggggatttgatccatgacgataaaatcctttttccccacatactccctccgggtaccaggatctccatatccgtcccggaaacgtacttccagttcgtatatttttccgctggccagaggttgtaaataggtcagcagcaggtatgcatccttgacgggcacttcatatttttctccggggttcaaggtaataaagcgcataagatccgcgacacgttccatttgataggagggaagataccatgccgttggcctttctcccttctttccgtttccctgactccatatcttgatgatgatattcggcccgcgttccttgagaggatagaagtcgtcgaaaagacgcacagccttttctcccttgttggcaaacacaagcttgaagtccggaaaagcggctcttggatcgaacgaagtcttttccatcaccacggaacattcaatcccattgtccgccttgtccccccatgcagaagcatggagggacaggctggccagaagtcctaaaatctggaagatttttttcattacagcacgagtttagtcgccgcccggagagtccccaggaaacaattcttaccctgctgattatagtagcgcgtttccagttcacaagaacattgtttccagtcttccaactcgacgttatccagacaaaccggaattgtcacatggtattcctctccgggtgcaagctcccggtagttcaatgcacgatgaaacgtcattgttcccatcttacgctcaagaacacgaacgtctccccgttcggttcccagaatcgtcatgaagaagaaatcggacgtttcgtcgtcgatttcgtccagaatccggacaggcagacttccctcgttgcggaaacagactgtaatttctccctgcatgaacctggatgtgtcagcaatggagagcttcagggatgttgattcctccgcaactgccctgctccgtgttttcccttcgttgaccggcggcaggaagcaaggaggctcaatcgtgccgggttgagtaatatccgcagaaacgttccatccattggttaacgcctgttctataacctgaagggtagcattattcaggacttgttgtccggcacaataggggcggtcgttggcgccgtccggcaaacgcatcacataatctttaacttcgagccataaaatatctttccacgtttggacagccttattcatagcttctatggcgtcatccatctccggcttttcagtgcaggaaacactctgcttttccaattcttcctgtatttttaattccttccagtagtatttgtaagcatcttcccattgccggcggtggtgttgttcgtgcgcgagcgaggcggcctgagtatgccacttccacactcctgcacgagattgatagccgttcatgcagtcaaccgcttcgatggcctcagcctctgaaacgggagggttggccaaagcatctctgtaagagtcagttttcagagaaatcttggaaccacaagtaacgagctgaaggcgcaacctccatacattggcggcctcatccttgcaggcggtaacatagaaatttggaggcgtgcccgttgtttcacttctattcagactgttgtcaatcgtaaattccgggtggtcccattggatttcgacttgttgagaaggttcacatgtaatggaagcctcccgttcaatcgtccaaagcttgattttgggagatgctgaaaattcacggttcatggtggagtttccctggtacttcccttccataataggtttggtatccatggtaacgttgaatgcaatggcattgttgctgacaggcttgtaagcgtgattgctgtatatcaaagaaaccttgtaatacccggctttcagatatcttgaacccgtttccagagacaatttcccattgggcggatctccttttttcccgcagagaagttctcctgcaaggctgaggtacccctcatcatcggcttctacaccgaaataatacaagccgtcatgttccaccttgatgaacatttcgggagctccggcacaggtggcataatccgaaggagttccgtcaaagccatatatcatttcatcaacaccgagcgtcttgttgataagaggctcatacccttgataaatgcagacgggattaactgccttgttgattggtatgtaattattcattgctattgtttgctgtttattttttggaaagactgaaccatcagtcttctagtatcctgccgatgttccattgaacatatcaacacgtttaacgcgtagttcaccccacattcgccacgtaggggaaggttaaaacgacacgataatcaagcggaaaataaagggtatgaaaggggtacaagaacacaaccattgactatcaatagccaaaaactgaattctcttcgttcgggacagagcggaagccagaagggaacaggcaaaatcaggaatctacacaagagaaaaaattatggaattgaagatttcagaaaaggagcggcaagaactcttaaatctcttgaagcaaaccgaatctgaaaaggaaaaagcaaaagccatatgtgaacaaaagcgtgtaaacaaagaagaggataagaaagcatttgaagaaaagctttcacgaatgactcccgatgaaaaagccaattacatctttgccaaactgaaaaagggatattctgcgatcattgaagttgccatcaaagaaaacatgcatgaccctgacatgtttgagttcatctcttttacagggcaacctctaaaagttgagtctggccggacagacataaaagccatttacaaattcagagggaaaaacgcccttggagccaaagtcctcaactctctggaatgcaaaatcaataccgacacaggagcactctacgacatccaaaatcccaaagcaggagaatgaaccttctccacaaaaaagccccgctcatatttcatgagcggggtagatttttcagaaaagttattttgtcacaaattctttccttgccacgtatcctaccgaatggctcggtgtcccgtaatcgtcccggtaagtcactttcatcaaatacttcttccccctttccaagggatggaggtagatgacatgtttcgcaaaattccggatgggaacccggaaaggaatcccgggcttcaaggcggtgaacttcatgttcgctacactgcgttcaacacggtaacgcgcccagtaataagccatttttttagcttctccatcccatatctccagaatgatatccggttttacgttatttgcaggatagaagctgtccagcaggcgcacttctttccggcttttattggtaaagatcagcgtaaaatccggaaaaggcttgcccgtctcgacaggttcggatgccagaacaacggaacattccacctccttgctctccggccaaaagttgaattcgcctcccagggacgggaggcaggtcaacaggatcaggcagggaagaagaatttttttcataaaagtacagacgcggttgtttccaaaactccatgaaaacagcctgttccatgccagttgcagaagagcatttccagttctccggattgaacttccatcaattttcctgaaatttgggaactatctacgggaatgtcaagcctgtattcttctccgggagacagctcaagacagggcaactcccgggagaaggtgattttccctaccttggaattcaatcggtaggtcctccctgcctgcaaacttgtatagaaaaagaaatccgacgtacgatcgtcaatcacatcaggaagtttgaccacatctccgctgatattttttaaaccgacccttattctccctctcagcaagtccgcagtatccgcaatgaacagccgcagaggagccacagtcctgattctggagcccctggcactttccccattgaccggaggcagataacacactggctcaatgactccaggttgggtaatttgacgcggaacgttgctccagccgttccgatccaccagattgatgacgaactccgtggcttcattcaattttttctgcccggcgtgatagggcctggtattttctttatccggcaaactcaggaaatatctatccgcttcatcgtggaatttctccatagtagctgctatcttcattttcatttctttcaaggcgtcatccatttcaggaaattgcccacaggacacctggatcttttccaattcttcctgcaccttcaagttggtccagtaaaaattgcatgtgtccttccactgttgcttgtgatgctcctcatgggccaaagacgccgcaagagtatgccacttccaaactcccggacgagactggtatccgttcatgcaattgacagcctcaatagcctcggcttcggtaaccggtggcttgaaaagagtatccctatagaaacctgtatgaatttcaatgtcacatccgctggataccatctggacgcgcaatctccacacattgttctgggtatccttgcaggcagtcgtacgaacatccaccaatagagggatacactggcactcaccggtcccctcatcttgagtcagggaatttttctcccatttaatctctacattttgagaaggttcgcatgtaattccttcttccttttcaatcgtccaaagtttgatttttggcgaaggagaaaaagagcgtttcatggttgatgctgcagagtagtcgccttccttaatgggttctttatccatcgtcacattcaaggcgacggcattgccgctgacaggcttataggcgttattggtatatgaaatcctgactttgtagaatccgggtttcaaatactgttttccagtagccaattccaaacgtccgtgtttttcaggagcctgtttgtcacatacgcagaactctccaatgaaaagttgaccaatatcatcagcttccacgccaaaatgatacagcgcctcttcttccaccttgatgaacatttccggtgctccggcacaggaggcatgttcgcacgagcctccatcaaaagtgaaggtcatttcatcgacacctagtttctgcggaatgagggcttcgtaaccgtcacagagaaccttcggaccaatagccttattgaaaggaatataattattcattttattgagtgttgtttattttttggaaagactgaaccatcagtcttctagtatcctgccgatgttccattgaacatatcaatacgtttaacgcgcagttcacccctcattcgccacgtaggggaaggttaaaacgacacgataatcaagcggaaaataaagggtatgaaaggggtacaaaaagtataaccattgattatcaatagttaaaaattgaattctcttcattcgggacgaagaggtcgcaggttcgaatcctgtcagctcgaccatatttccccattgcaaggccttgtaacccattcacgttacaaggcctttctcttttccgacttgtgtattccgcgaccttgtggataaactatcctgcccccgtacttttacttgaacaccagcttgagccctctctcctgcggttccatgcacaacagcattatcttgttcgtacggagagatatgcacaggaaaagcggcctatccattccggaaatttaatagcccccggcgctctgacgacttgcgacatggcttttattcaaggccaggcatctggcatgggactttatcagtcatccgtcaaattcccattgcccagagcctgcttctttttctaaaatacaggtaatgagtgaatacttcctgaaactccccggcgattcccagccgagagcctattccgaatatgaagtccgtgaatttctgggacagggcgtgatcgactcaacaacgctcacctggaaacagggcatggatggatggcagcctgtggaccaggttctgccgtcaatgtcccccgtccggaaagaattgcaggaggcagaagaggaaaaccagccagcggaacaggaataccgtttgcgttatcctctggccgggcttgccaaattatccatcctggcgtgcttcgtgctgctgcctttcatgctctggagcagctggattgttttctccaacaacgtcaccaattatgaggaaatccagatgctcatccagcagaacatggctcacctgccgtccttcgcggttccgctggttttccttttcagcatcctgttcattccttccctgctcatccagttgatctggctgtaccgggcatccgccaatgtccagggcttccaaattccggggctgcggttcacgccattcctgagcgtcctcctgagctgcatgccggtagtcggcatggtgctcaatgccctgatccttcaggaattataccgggcttcaaagaatccggcggcatggatgctgcaagccccctcccggtcgctgcggctgtatctgctcgttaccacggctttgaccctgtgcgcgctcttcccctttggggcggaacattacctgacggcatttctggtgatcggctcgctgatgacggcggccagcattctgtggctggtctgcgtcctgcaaatcaccaggaagcagcaggagctggtttccaaaaatccggacacacgctcctgacggggaaaacgccggggtcagcggtctcccttttcctccgtgtccggacggtcgtccggaaggattttatccagcgcttccatactattgtccttgtacaggttctccagcagcttttcccatcccgccgccatttgaacctgtttcagggcaataacgggatcaggcatcatcatttccggggagggagcgtattgtttcaatacttcatccggattgatccggttgaacgtcgtttttccatagcccggcattcccgcttcatgggcgatggattcaatcatctcaaaatgcagatgcgccagatagttgccgtgcgccgttccgaccgtgccgatctgctctccgcgccccaccagcgcccccaaaggaatgtcgctgacggttttcaaatgagcgtacaggctctgcacaaaacgcccgtccggcaggcggtggagcaggacgacgacattgccccagtccggcgaaggctctcccgcgtaaatcaacagcccgcgtccagcggccctcacgggcagaccctcatccgtgttctcgccaccaatcccattcaaatcctgtccggtatgccgccctccacgggcggcattcatatcacccagtccctgggcaacataggtaaaggcgccgttttcatctccgagaggggacgtgaacgcatccgccagcggagcctttgccagctcctggggcgtcagcaaaatcatccggtaatccacaggcaccggagcagaccggggaacatcctcatcataaatattatggcgcatcccggcatccggagaggcggcatggctggttttataccaggcaaacgccgtaatcaggatgcaggccgttcccagaaggcccagaatgacgcgggatgtcgtcttgtctatcatcgtgccgactttatatccaatgagccgtatttacaatcacaagatggtcagaccagcgtctccggaaacttttccgtccacaattcgcgcgccgcacggatgtcctccgcggaagcgcgtccggagagttcccagacgagcggaactccatgcgggaaaaaaggcagcaggcgttcaaacggcactccgccgcccagcaggggaacctggtggtcccgcgacggccacttgacgtcgtttacatgcccacctatcaaatgggaagacatcctgcggagaaattgttcatgattcaatataaggagattgtgcttcctttgaatatgaccgaagtcatgccagtacccgatgaagggattttccccaaattcctgcatcagcaggcccatttcatcctcgctgggaacctgttcataatggctgcgcccttcaatgcccagctttacgccaagttccgcagcatggggcagaagctgccggatggcctcacgggcacgttccagataaacgggagcaagccggttgcggcggcgcacaaactcccccttggttccggcaaatgactccgtttccaccattccctgacgcgccaggctctgcaaatgagccgtatccgtacgcttcaccagaggttccaccgtccccatgtgcagcacaatgtatccggcgcccagggcggccccctgctccatggattttttcgtcagctcaatcgccttggcgcgcacctgcggcaaatctgcggtaaacggcctgctgtccggagcgtcccccacctcgtcgatgggtgccgggaaataattatggaccccggccacctgaacctttccggcttccaccgccctcatgatgccgggcagaagggaaagcttgatgccgtgggaaagttccacatggtcaaatcccagggagaggatttcatcaatcatctcttccccgtcctggtggcggtgggagttccagcatgtagaaaataccagcataggcaacggtcaactgttatgaactgatggagccggggtccgtataggaatccttcatccattccctgacggcggcagtcatgctgccggccacatccgctcgcggtttgacgaaggccgggacaaaccacgggaacgcccccaccaggtcatgaatcaccaccacgtccccgtcacacgtatgcgcgccggaaccgatgcccagcgtgggaatgggggaatgcacggtaatctggcgggccgcatgaggcgtcacgccctccacgaccacagcgcaggcacccgcctccgccacggcttccacatccttcaccagggcttcctcctcagcggaggatttccctttgattttatatccgccttcctccagcaccttttgcggcaagaggccgatatgccctaccgcgggaatgccggcatccacaatggcacggatcttttccgcctgggcggctcccccctccagcttgacggcgtccgctccggcctggaacagcctccttgcagactgcacggcctgctccaccgtatcataggtatgaatgggcatatctcccaccagcagggcattcttcacgccgcgcgccgtggcttccacatggtgaatcatgtggtccagcgtcacatgggtggtatccggaaaccccagaagcaccattcccacggaatcgcctaccagcacaatatccacgccggcctcatccagaaggcggcccgtagggtagtcataagcagtcaccagcgtcacgtgccgcctgttcttgcaggcgcggatgcgttccgctttttcaagagattgattcatgatgttctataaacatgcagttaccagcgttccgataccaggagcgggtcagcctcatccgtatccagttccgccagcaggcaggaaaccgttttagcctggcggggcagaatgaggtccggcctgatgtcggaaagaggcttcaagacaaattttctcaaatgagccctgggatgggggagaatcaggcggggcggatcgttgaccaccatgtcccccgcgtaaatgatgtccacgtccgccgtacggggttcgcagcggattccggagcggatgcgtcccagggcgcgttctatgccctggcaatgcaccagcagttcttccaccgtaccgggccaggtgaactccaccacggcattcaaataatcatccgcgccatgcggacatccctgcggactggtagcatacagggaggattgcaggaaaggatcgtcggacaggctcatcttcagcagatggtccctggcctgaaccatcaggctgtttttgtcccccatattggatcccagtgcgatgccggctctcttcatcagcaaaaaaggcatcatggccgttccgggaaggggagacgaccatgatgcggaaaaattataattgggaaaggcccagaacgtcttccatggtatacagccccggttccctgccctgcagccagagagctgcacggaccgctccggaggcaaacgtcatgcggctggatgccttgtgggtaagctccaaacgttctccgtcagaggcgaacaccacggtatggtctcctactacatcccctccgcgcagggaatgcatgcctatttcattggcgggacggggacccaccaggccttcgcggccaaaaaccacgctgtcttcataattcctgccaatggcgccggacaggatttccgccagcgtccgggccgtgccggaaggagcgtcaatcttgtggcggtgatgcatttccatcacctcaatgtcgcagctgccgcccaggatctgggccgccttgcgcgtcagccagaacagggcgtttactcctgcggaatagttggacgcgaatacgatcgggatggatgcggctgcatccataatctcctgacgttccagctccgtatgccccgtggtgcctatcaccaggggcttgttattggctacggcttccgccagcagggtgctggtgaaagcatggtgggaaaaatcaatggcgacgtcgcatttggcgagagccggataaagctcctgcccctggtcgtacgtggcgcccacgcaggtgtccggattctgcgtcaccgcctcctggacagcctggcccatgcggcccgaaatgcctgtaacaagaatggaaatcatatagttgagatatcaaagaacgttgaaacgttgaagaagcgcggaaagctgggcttccttttcttccggcaaaggaaccagcggaagccgcacgccgggctggatatcccccctcagcgccagcgccgccttgatcgggacggggttggaatccagtgtcatgaggcccttcatcagtggataaaatgttttctggagggaaagcatttcacccatattctgatccaggccggctttcacgatggaattcatgattccgggaaccagattggacgttacggaaaccaagccactggcgccacaggccataaagggaaccgtcaggccgtcatcaccgcacaggacggtaaaatcttccggaaccacctgcatcagctggttcacgcggtccacgctgccgccggcctctttcacgcaaataatgtggggacagtcctttgccaggcgtcccaccgtctccacgctgatttcaataccgcaacggcccgggatgctgtacagcatgatcggcaggcgggtggcgtccgcaatggccttgaaatgggcataaacgccatcctgggaaggcttgttgtaataagggcacacctgaagcgtaccgtccacgcccatcttctccgcctcctgggtcatatggatggcctccgcggtagaattggcccccgtacctgcaactacctgaatgcggcctgccgcgctctccacggccagttcaatcaccctcaagtgttcttttacagtcaaggtgggggattcacccgtggtgccgacggccacaatgccggccacgccggcagccacctgggcttccacaagcattctaaaagcctcttcatcgacccgattgccgacaaacggagtcacaattgctgtataaagaccttgaaacttcataaccttacttggaaatatactatattaacagacactttttgtcacgacagaatacagaaatatggcatgcctgtcaggcatcccggaataccgttcgggaacagacggaacaaaattccagacaggagttgaacaaggaaagagatgcttccgtcctcatgccgggcttccaagcggcttttcttccattgacaacgatgtattcacggtgaatatgacgcccttccctcccgcacagaaataacgccgccgcacacgcggaggaagccagcctggactgggagacgtgccgaaataccggacggtgaatcacaacctggtttatcctgacgtccttcctattcagacaattctccaaccctgcggcatcttccttccaacattgttccctccatcttacctttcttccggaacgggagaccatattcacaatcatggcgccggaaacaaaagcgtgctcaagcagaatggacaggcgactgcgtgcggaacaattcaggccctgcacctcaaccgcggcatcctcacagttgatcaaataatcgactcgtccatagagggtatgtaccagccctgcgaaggaagccagatccggaggatggcccagacagcccgacatgccaaagtgattgccccctggcagacagtccaccacgcgggaagactcttcaccggcttcatgcagcatggcaaccacagttccccggcacgcaaacgccttggcggcgaggtatcctatgttgccggcgttccccaggatgaccgcaacgggcttctgaatgatatgggatttcatacgccgccatttttgatggaagaacgggtgccgtcaatagcaggaatattcttaaaccgttaataaagaaagagtgatagttaagaaaatgttacgtaaggtaagaactctattacgacagggatagccgtcctccttgtttgcctcatcctccttcagttccttttagcaaagtagaggaagatcgcgccatcaagaaaacgaacaagccccgccagttgaggaactggcggggcctgatgaaaaaaaatcccggcggcgacctactcttgcgggacctatcgtccgactaccattggcgcggcagcgtttcacttccgggttcggaacgggaccgggtgggaccactgcgctctggccaccgggcttcagggggaagagtttttcattttcttcatcctgcctgcccgggagcccttgggggggctttgagggggattttttaagggttgttgtgtgtgtggctaagaagatttcctctcgttacgaggggaaggaatcagcgtaaactgacatctgcgtggctggtggtgttacttttaaacatacatccaatgaacaagacaacagcaagttgttattcacgaacgggagtgatgtaatatgatgaagtctattggtgattagtatcgcttggctcaatacattgctgcacttacacctgcgacctatcaacgtggtggtcttccacgaacctatagggaaaactcatcttgggatgggcttggcgcttagatgctttcagcgcttatcccgtccgcacttagctactcggccatgcacttgacagtacaaccgatgcaccagtggtgcgtcagacccggtcctctcgtactaaggtctgaacccctcaattttccaacgcccacagaggatagaggaccgaactgtctcgcgacgttctgaacccagctcgcgtgccgctttaaccggcgaacagccggacccttgggaccttctccagccccaggatgcgacgagccgacatcgaggtgccaaaccacgccgtcgatatgaactcttgggcgtgatcagcctgttatccctaaggtaccttttatccgttgagcgacggcaattccactttctaccgccggatcacttgggcctgctttcgcatctgctcgacttgttggtctcacagttaggcgggcttatgcccatgcactcgacacccggttgccaaccgggctgagcccaccttcgcgctcctccgttactctttgggaggataccgccccagtaaaactgaccggctgacacggtcctctggccggattcacggctcagggttagatcctccagtttcaaagggtggtgtctcattgatgactccgacgccccctaaagggcgtcttcagcgtctcccacttactctgagcattaaaaccgaagaaacaatgacagcttacagttaaggtctatagggtctttccgtccttctgcgggtaggcggcatcttcaccgccactacaatttcactgagcgcctggttgagacagtgcccaactcgtttcacgattcgtgcaggtcggaacttacccgacaaggaatttcgctaccttaggaccgttatagttacggccgacattcaccgggacttgggttcagagcttcgccttgcggctaaccccttgccttaatctttcggcattggtcacgtgtcacaccctatacttcgacttgcgtctttgcagagtgctgtgtttttgataaacagtcggttgggccatttctctgcggcctgcatcgctgcaggcaccccttcttccgaagttacggggctaatttgccgagttccttaaccaggtttcactcttacgccttggtatattctacccacccacctgtgtcggtttgcggtacgggtcgcttagcatacgctggggcttttcttggcactcgatccaatgatgcgctgagtccgtggactcaactcggaattcaataacctagtcatcttttctcatgcgtccccccagtttaagggtcgcgagctcaggattattaacctgatatccatcgcctacgcctctcggcctcggcttaggtcccggctaacccagggacgaaacacgttgccctggaaacctcgggtttacggcggccggggatttcacccggctttacgttactcatgtctgcatactcacttgcatgtgctccagggtcagtcgccatcacccttcaacgcgcatgcaacgctcttctaccactctaccgtaaggtaaagtccagagcttcggtataacgcttgatcgccaatcattttcggcgcaggatcactcgatgagtaagctattacgcattttttaaatggtggctgcttctaagccaacatcctcactgtctgtgtaatcccacatcctttccactgagcgttatttaggcaccttagctgctggtctgggttgtttccctctcgacaatgaagcttatcccccactgtctcactgccacgttccattgcacggtattcggagtttgataaggtttggtaagcgggtgtgccccctagccttgtcagtgctctacccccgcgcatcagcacgtgacgctgcacctaaatgcatttcgaagagaaccagctatcacggggtttgattagcctttcactcctaccctcagctcatcagagaacttttcaacgttcacctgttcggtcctccacatggttttacccatgcttcaacctggccaagggtaggtcacctccgcttcgggtccagtacctgcgacttaattcgccctattcggacttgctttcgctgcgactccgggccggaagcccttagtcttgccacaaacactgactcgcagactcattaaacaaaaggcacgccatcgcagattgctctgctctgacactttgtagacatacggtttcaggttctatttcactccgctcacagcggttcttttcacctttccctcgcggtacttgttcactatcggtcgccaactagtatttagccttgcgcggtggtccgcgctgattcatacatcgttccacgtgtgatgtattactcaggattccactaattcccacgctggatttcgtctacagggctttcaccttctacggccagcctttccaggctgttctactatccagtatggtcgaatatctcgtggtcctacaaccccgaaggagtaccttcggtttgggctccatccgctttcgctcgccactacttacggaatcgatttctctttcttttcctccgcttactgagatgtttcacttcagcgggtttcgcgtttcataccctatgtattcaggtatgaacgatcgagtattgcctcgatcaggttaccccattcggatacccccggatcatcgcttgcttgcagcttcccgaggattttcgcagcttgccgcgtccttcttcgcctgttggcaccaaggcattcaccgtacgcccttacttacttcatcatattgcaaaagttttttaccacttccacaataccacaaagccctttcgtgacttactgtattgtcttatttcttggtatgcatgttttaaattgtgtattgtagttgtttttcaactacccactttgttggaaagcaattgcttctcagcaattgttttctttgccacgcagatgtcaattttcgctttccctcaataatcgatttttttggtgggcctgacaggacttgaacctgtgaccccgcgcttatcaagcgcgtgctctaaccaactgagctacaggcccggctttgggtctctgagagacagttaccaaatactaaagtttagttactaaagttttccggctcccgccttcttaccgaaactggtggaggcacggggactcgaaccccggacatccagcttgcaaagctggcgctctaccaactgagctatacccccagttgcggttctttttgaaaaaaggtcgtcacgcacgtcgtgcctagtttcgctccaagcgaactggctgtttacacatctttggttcgttgcgggccctcgcgggttccgctctctcttccctcgggaagagatccgacctgtgcatttttcatgcactttctccatagaaaggaggtgatccagccgcaggttcccctacggctaccttgttacgacttcatcccagttaccagtctcaccttaggaccctgcctccttgcggttggcttcagatacttcgggtgcgaccggcttccatgatgtgacgggcggtgtgtacaagacccgggaacgtattcacggcgccgtagctgatgcgccattactagcgattccggcttcgtgtaggcgggttgcagcctacagtccgaactgggcccagtttttaggatttcctccgcctcgcggcttcggccccctctgtactgggcattgtagtacgtgtgcagccctgggcataagggccatactgacctgacgtcgtccccaccttcctcccagttgatctgggcagtctcgccagagtccccacctttacgtgctggtaactggcaacaggggttgcgctcgttgctggacttaaccaaacatctcacgacacgagctgacgacggccatgcagcacctgtgtaacgcctccgaagagtcgcatgctttcacatgttgttcattacatgtcaagcccaggtaaggttcttcgcgttgcatcgaattaagccacatactccaccgcttgtgcgggtccccgtcaatttctttgagttttaatcttgcgaccgtactccccaggcggcacgcttaacgcgttagctccggcacgcagggggtcgattccccgcacaccaagcgtgcaccgtttactgccaggactacaggggtatctaatccctttcgctcccctggccttcgtgcctcagcgtcagttaatgtccaggaacccgccttcgccacgagtgttcctctcgatatctacgcatttcactgctacaccgagaattccggttccccctccattactctagtctcgcagtatcatgtgcagtccgggggttgagcccccgcctttcacacacgacttacgaaaccgcctacgcacgctttacgcccagtgattccgaacaacgcttgagacctctgtattaccgcggctgctggcacagagttagccgtctcttcctcttgtggtactatctttttaatttgctcccacatgacaggggtttacaatccgaagaccttcattcccccacgcggcgtcgcaccatcagggtttcccccattgtgaatgattctcgactgctgccacccgtaggtgtctggaccgtgtctcagttccagtgtggccggacatcctctcagaccggctacccgtcatcgccttggtgagccgttacctcaccaactaactaataggacgcgagcccatccccaagcgcattgctgctttaatcttgcgattttatgcggtattaatcccagtttcccggggctatcccactcttgggggcaggttactcacgtgttactcacccgtgcgccactagagaattattagcaagctagcaattctctcgttcgacttgcatgtcttatccacgccgccagcgttcgttctgagccagaatcaaactctccatcaaatataatttttgaaattgctggaccaaatggaatctttcgatttcatctgcgccatgcttcagtcagctcttccctcaagttgtgtctcttgaagtcctcttcgctctgccaagcacggcgcgcgtcacgaccttttttctttccccttgcttctaccaatccgcccctctcggagctaggtcgctcctttgggttttttctccctcacacgtcctctcgacgcattcgggaaaaccctcggcgggttcggtagtcattcccttgaaatcttcttatcggcccctttaatgaggctcttccgggtggccggccccggcttcattcaggccctctttcgagtccctcctgccgccgggcttttcatcccgtcgccgtgttggcgtgccgagaagtctaccattttcacctcccttgtcaatttttttcgatatgtttttgcggagatttttttagaattctaaatattactgattcttaacgtattacatttttctcttttcccgcaaaaaaggcccctttcatcacgaaaggggcctaaacgtttcagaattcttaagcttccgcctgttttttcttcatggctacatactggtgcatgaggggtaattcccggagtgcattcacagcgtcttttttcgcctgggcgtagtcttttttctccatggccatttccatcatgacttgatagcaagccgcattataaccaccgtcatcccgcgtattgaagtctttcatgatctggagggcatgccgggccgcttgatagttgtatccacgcatttcatccgacccattcaggattttcaggaggtaagaagccagggagtcttccttcggaaaacgcttcagcacttggtctatgatgtccgccaccttttggtagtccttctccttccaggctttccccgcctgaacttccgccactgtagaggcaaaccatccgtcatcggcaaatcgctcggcgttttcctcaatcagttttttgtattcatcaaatttcttttccttgcgcagttcaaaagattttttgatgacagcctgcagggcctgctgatgagctttgcgcttcgcatcctcctcagcaaaccggttcttgtcaaaagagtcccagagggccgtttccgccacccacgcgggcatccttttaatttcccctgcccacagcaatgttccgtcacgaacgacggcggcggcagggaacgaattaagcttcagggaatcaaaaagttccatcacggaatggtccgacggaataccgacagggtaggcagtccatccttccggaccagacagatattcctgcatctgtttttgatccatcggaatgacacccaataccacagccttcaccttgggattgtccagaagaccatattttttcaggactacatcaagcgttttccccggagctccatcactccacatgccattgttcctcgcagctcctctccagaagctgataaatacggttttgtcagaaggcaagcccgtcagcccgggatgattgaaccaattcagcttgctgaaaaggggcgtgtattccttgtcttcctgcacaggccccatttcctgcattttccgaggaggctccggcttaatttcctcagctacctggtccacaagggattggaacgtctccgaattgcccgaaagctgctgcagcttcgtccacgccttgctgatggaggtcagggaaagcgccttttccatatcccgaagcgcttccttcatgttgccctgccgctcccggagttcacccatcagacgccagggaagggaagcttccttgttgcctttccttgagatttcaatgcaacggttcagacaccgctccaccagagcggcatccatcttgccggcaggaactgattttccttccatcaaggttccagccacattgatctgcacgcggtagttgtccggatattccttgcacaagctgtcaagtaccgactgagcttcctggaattctcctttttccgctagtacgatgaacgggatcatcttcagttgaatcatctgatcctgttgaaattcccttgaatcctggatttgctttaaaaacgccatggctccctgttttccttctttccggaccacctcgcccagctttttcgagacttcccgataacgcttccactcacgggcgcccgcatcagaattttccgacggaagggaagcggcggaaaaatcaggtttcaacatggcctgcatgatttcttccgagagttttacgggatgtccgcgccagatgagtttaccgttctttacggcaaaggcatgcggaatgccgttcacatccataggagccagccatttttccctggttctctttccatccacatccaccgccattgtgtaagtaaggggagacggccgattttttaaaaattccttcagagcctccggagatttccggtccatgacattgactcctatgatctgcatgcccgggttgtctttaaatgcctgatgcagttgttccatatggggcatggcggccaggcacggtccgcaccaggtggcccagaattcaaagatgtataccttgtccttttcccattccttgacaggcgttccctgcagccatacttccggcaatccctccagggaaagggtgggaagagcatccgcagaagcggcagttttattttcttttttttcaggagaggcagccagtaaaggcattcccgcagacatcataaaaaccgcggaacaccccaaggcgaataaagaggaatttaacatgataacacggtactcccggaacgggcttcgtcaagccaatagaagaagatgaaccagaaaggatccctcccaacgggcgctccttttccggaacagcggtaaaaataccttgaagaaggaagaatattaaacatgaagtttttcgtctaaaataagaaaacaggcgcttccaggattcacatttttttgagtttcattggatttaggaaaaacgatttaccttttcggatacacaaagacaatattattttctaaaatagaaaatatgccagaaatggcttgccagatttttctgaatgcgaaaaatgcgcgcatggatgaaatgaagtccagcatcagaaagtttcttgcccttacgaagatgacacgtgacgagttcgccgatctttgcggcgttagcaaaagccaggttgataaatggctttctactgttcctattccccgtgcacgacaacgcctcatcatcagaatcatgaaagaggagtacgccaaacacgcacgtttggtgcagaccaagaacccgaacagtatttatgttcccgttactcctcaaaagtatgagaagttcagaaatgaagcggaacgccacggtttgaccgttccggaatgggccagtgaggctttggatgctctttccagcatcaagagcaaaagttaaaagcagggttcactatcccggaacagttccaaggaaagagaaaatagcgtttcaaacgctgccatcctattttttctttcatcacataacctgcatcaattcatgtctgacgacgatatacgcaccatggtcaaggaatggctgcaatgccaaaaacgcaagtcctaccaattggcggaggaaataggaatccggccccagacgttttacgcacagatgagcgttcgcaaaatatcggccaatacgaaaaaagcactttcccgaatcattccggagctggctgccgatgcggatttaaacgcttcttcctctgagaaagaaaacaatcctgaaaagcttaaaatcaaggaatggctccgcacacacggtaaaacgcgccaatggctggcggaacaatgccgggtttccgtccgcaccgtgcacacctggtttgcctttcgcggcagcattcccgtcacccagtcccttttcatcggcaagctgatgagtgagggcgaaccctggaaaattcaaatatcaaataccattcccgtgattttttcagagacggaaatgagcattatccacaagtttcaggaacgccatccggagatcgaccttcccatgtacggcatgcataaaattctggagttgtgcgtaaatgtactcgttcaggatgaatattcaaatccgctccaaacttccggtttcatcagaaccccagagatttgcacccggcagtcagaataaaaaatattcagcctcccggttccctttctgtgaatacatgcgctattgaatgcactagccccgtgcgcggaccatctccggaacgcctcagtattcccgccagtctgaaccgtttctttccatccagtatggcgcccattcggaggcccttccctccccttccggtgtgatgacggcagaaggattttttaactacggcccccattccatcagttccatcgcccaacaggattgattgaagaacaggaggcccccttttccgtgcacaagataagaacgggaactgctatttcttccgacaacggagcaagacagccacacgggataatgccgctttattcaggccgcccatccgtatttgcaccatttccggccccgtgccaccgttcttgcagggatgcttccaccgatgaaagaaacttttccctcacatgaaagaaccccgtttttcttaaaaagaatacggggttccgaaagatggcacgtccaactggattcgaaccagtgacccactgcttagaaggcagttgctctatccaactgagctatggacgcatggtgcggaaaaagattaacagagttcatctcggcttggcaagcccgtatcttttaaaagcgcgctttcagccgccgggtcagcagttatccgggaaagagatgcctgccagggcagtcccgaattcccgcaccagcggttcctgacgggagaacatgcgttcccgttcttccggctccgtgtctatgtagccgtgcaggtgcaggagaccatgcaccatgtaccggaagagctccctgaaaaccggctcattgaattccgacgcctgccggatggcggtatcataactgacgatgatttcccccattccgtccccatgcgggaaggtgatgacgtccgtcaccgtgggatcattcagaaaacgggcgtgcacgtcccggatcacgtcatcgtccaccacgcttatttccacctcgtccaatacggagaggacgggcacagggccttcaggcaatgccagcacagcggggaggcaggcatccagggcgcgggccagggcatccgcaacggacggactgagacgcccttcttccagatgattataaagttcaagacgcggtttcatttttctccgtatccgtcccgtccttctgctccacctctgcgggcttttcctgctgaccggcatcgggcagttccatgatttccggaacagctttgccttccttttcctttttctccgctttttcctcttccttcatggcagtcaccacaggaagaacaggcttttcaatttttgcctccggattgtgggaaggatacgcaatgcggttgtggtgaatgcttttcagcgtcttgatgaagctgttgcggattttcttgagatccccgaaggtaaggccgcaatcgtccaaatggccgtccaccaccctctgcttcaggagttcatccacccttttctgcatttcctcacaggagatttttcccatggagcgcgtggcgctttccacgatgtccgccaggctgacgatgcccgtttccttgctctgggggttggggcccttgtagcggaagttggattccaccacttccggcacatcgtccggagaggccagcccgctttccacccggctcagaatttcatcccggtattgaagggccttccggtaaaagaagtaggccagcgaggtgccgtgatgctgctcaataacgtccaccagaggacgcggaaggttgttcgccctggccagctccaccccgtcctgaacgtggtcgatgatgatgcgggcgctcatgctgggcgtgagctcatcatgggggttggggccgtccatgatgttttcaatgaagtagagggggttctgcattttgccgatgtcatggtaataggccgctacccggcattcaatggggttggcgccgatggcttccgccgccgcttccgccagctgggcgaccatcaggcagtggtggaaggtacccggagcttccatttgcagcctcttcatcagcgggcggttcatgtccgccatttccagccaggaaatgggcgtaatgattttaaagaccccttctataataggcagtacgccgctgatcagcacgctggtcagcatgcttacgccaaacgccacggccaggcataccagtacgcctaccaggttgtagtcccacgcctggagattgatgacgcccatgatgcagcacaataccatgacgagcagccccacgaagaagcccgcacgcagcaactgggcacggttccgcaggttatgggtaagcagcacggtgagcatgccggagagggagctcaagatccagaattggacctgcttttccggtacgtactgctccggcaggatgaagaatccaccgagcatgcagatggagatggtggcgaacatgcccagcagcggccccagcagcaccgttacaatcagcggtgccatcatatagggcaggtacaggagttcgttgccgatgtcggacgtaatatcagccgtcacatgccggataaggccaaagaacaggagctggaccagaatggccccccacgtgacgacaaaggttttgtttttcctgcgcagggaaccggcgcagagccagtacatgggcatcagcgccagcgtcacggagaagagcagaaaggcttccgacacatggtgccagacggatttcccccaatggggactgtaactgcccatccattgaagaacgatgaagaccagcacgcacaggcccacggataccgccaggctggagtccagtcggtcaccgggggagcggggcacggaggccgcctcttccggtttttttccttcttttgccgctgctgcggcatgttttttcagaaaatgaaacatgattgattatttggggtacacttcggaaacctccggaatagtgcccagcctggccatctcctcttcaatgaggggattgacaccctgctgcaccatttccatggagactctcagggcattgcggatagcgacgggggtggagctgccatgcgcaatgatcgtcacgccccggacgcccagcagggggcttccccccacggagtctgcagagaggcgcgccttcatggcgcggaatgcgccggaagcgcaggcggctcccatcatgcggagcgggtttgcctgaagttcctccttcagccatttgccgaacgccttggcggtggcctcgcaggttttcagcaggacgttcccggtaaagccgtccgtcagcgccacgtctatttcatgttcaaagagatcgtggccttccacattgcccacaaatttaaaagggagcgcgccgcgctcctccagatgcttcaacagacaaaaagttcccttggtaaagtccgttcccttttcatcctcggagccattgctcatgacgcccaccttgggcatcggcttgccgtatacggaacgcgccagaatgctggccataacggcatagcccaccagatgacggggcttggcgtccggattggctccggtgtccgtcacattgcagactccgaattcattcggaagctgggtcacgatgcccgcgcgctccacgccgtcgagcagcctgagcttgatggtggcggccgctacggccgcgcccgtgttgcccgcgctgaccacggcgtccgcatccccggtcttgaccaagtccacggagacggacatggaagagtttttctttttccttaccgccagcagcccggattcattcatttccaccacttccgcggcgggaacgatttccacgcgcgggccggaaagcccccagcggtcacaggagctgcgcaccacctcttccctccccacaagatagattttttcaatgagagggaaatcctgcagggcccgcttcgccccgtccatgttaatatcgggcgcattgtcgccgcccatcacatccagtgcaatcttcatagtatttgttgaagaagtgtgttagcagaaaaaatagcctgcttcaagcaagttcagccgctttgcggagcaaaagcggctggagaggtctacatggtagcgccgcagtacggcgataactttcaaggcaaatgcggcgcctgcggagcttacgcttccgccttcaccacgatttccttgccggagcgggtcgtgtacgtaccgcaattggggcaggcggtatgaccgggggtgctgctgccgcaattctggcacttgcggagcttcggagcacgccatgcctgcgcggcaaggcgggtacgctgcttcatcttggacgttctgcgcttaggtgctgccataattttagttggtaaaaaggtgattaatgatgatcccccagctcattgagggcgtcccacacgccgctattcttgctcggggcagaactgtttacacccgttcccccctctttgtccactccaaaatatggagttttcgccatacagtcattttccatgcctccgtccgcacatttcggataggcaggaaaatccaggactatttcctccctcatggagtctgaaacgtccacaacactctgtgcgtcaatttcaaaagaggcggcaaaatcgctcacctccaccacgtagtcaaagtagcccaggcagcgcacgcaacggaatttgaacggagcggaaatattgccccgtacgaataattcgttttcaaatctctgcacctgcaagtcaaaagcaagaggcccaatggaagtaacctcttcatcatcgatgccgaagatttcggaatccagctcaccgctgtattttttccccgcttccggcaagttttcaagctctaccagcaatcttttcatgaatgcatcttacaggcagactccacgcctgacaagcagacagggcggcaccatccccggaaaagggcaggaatgacacatcccctccctcccaccggcggcactaattccgctccggcctaaccgggaggccattccagcttgcggcctgccagcaggtgcatgtgcagatggggtaccgcctctccggcgtccgggccgttgttgatgactaggcggaagccgctttcatccaggtggagggtccgtgcaatccgtccggcggccagcatcatatggcccagcagggcggcatcttcctcccctgcaccggaaaggcggggaatgggtttgcgaggaaccagcagcaggtgttccggagcctgggggctgatgtcccggaagcagacgcattgttcatcctggtacacgatgtccgcagggatttccccggaacagattttttcaaataacgtagcggccataagttcaaaaagggattcgcggtgactgtagcatatccggggagccgtggacaagtcattccctggaggcggaggcgcggcgcaggcggtccatgatggcccggcccagcccggcttccggaacgggttccgccacgatgacgtcaatggcttcattttcatccatctgcctcatcagggcaaacaggcgcacggcagcctccgccagccgtccgctgccggggctcatggccaccacttccgtccacctgccctcctgggcaagatcagacgttccctcataggagagcagaccgtaccgcactccttccacgggcacgaattcttccccggcttccagcagcgtcatgggtttgcgcggagcgtaatggctgccgagctggcccggagcatccgccggagcttcttccgaaacgggacggacagcaggcttgcggcgcaccaccttcaccaggttccggaactgctcccgggtcaccggaccttcacgcagcagttccagcgcgggctttcccttctcgtcaagcatgggacgcacgatggtgctttccagcccctcggagcaggctccggcgtccagaatcatttctatgcgtccatccagctccttctgcacggcggaggcggaagtagggctgatatggccgaagcggttggcgctgggcgcagccacgggacggcccagcgctttcgccaccccgcgcatggcgggatgcgcgcttacgcgcacggccaccgtaggcaggccgctggtcacgatgtccgggatgatgtccgccttcggcaataccatcgtcagcggccccggccagaatttggaggccagcgtatgcaccagttccttcagttcctccggaatggcggtgtatttgtccacctcctttccatgatgaacatggataatcaggggatcgaaggagggccttcccttggcttcaaaaactctggctaccgcttccggattcaaggcatccgctcccaggccatacacggtctccgtggggattcccaccagcgctcccgcagccagcgcttccgccgcacggacatacagcttgcggttgtctgacagggggtctacctcgaacatttcggtttgcatggccttatccttgcctgaaggaagctcctgcgtcaagtaagacctccttccccggaggggagaagccgtcaaattcgcggaagtgcggcatctcagccggacatgaaggttcctggccttcccctatttgccaaaccgggtctccttgacccttcccattgcggcattccgcccggagcggaagagggagacggaaaaggccatacggctaaaaagttgttttctcacgccgccggattgagtacaatcaggccatgaagggggccgcgccaacatccttgccaaacatcatcctgatcgggctgatggggtgcggcaaaacgaccatcgggaaggaattgcaccgggagacgagccttcgtttcacggatacggaccagatgatcgagcaccagacgggaatgagcattccgcagattttcaaggctcatggagaatcacatttccgtgacctggaaaccggaattctgcgccaattgcatggggcggccaggcaaagccgcattatttcaacaggcggcggcatcactatcaggccggaaaaccgggacctgctgaaaaagctgggcttcgtcgtctggcttcatacggatgtgaacaccctgtaccagcgcatttccagatgcaccaaccgccccctgctccagcagcccaatcccaaagccgtgctggggcgcctcatgaaagagcggcatgatttttaccgggaaacggcgcacctgaccattgacacggccaatcttcacattcatgagatcgcgttcggcattctggaatccgccagggtgttccagtcccgccggcagtgacgccgggccgtttttctatgtacgggagattcccgacgcagggatgccacctgacaattctcccgcatcagcgcaagaaacaacaaaaggcggtccccgtcagaggaacgccttcaggaaagatgatgaagaaccgggcttaggccttgcgggccttgcggatcatggaattgaccgtttcagagggctgcgcgccgttggcaagccacttgtcaaccttttccaggttgatggtgtagttgacgccttccttcatgggatcataggagcccacttgttcgatgtaacggccgtcgcgacgagcacggctgtcgacaactacgattttatagtaaggacggtccttggaaccctgacggttgagtctgattgctactgccatatcaattataagtaaaaggtgttaatggggaacttgcgcgccttgtcactcacatgcgtgcgcgttcagctccccacagcgggtgcagatgtatgcgatataatggagtcattgtcaataccagagttatttttccgagaaaaaagccgttccctcccatctccgcatcaggaaaaactttccaccgccatgcgcccgaaggagtacagcatgctgaggccgaaccccgccagcacaagagacagcactccatccacccctccggcatgccggtcataaaaggaccggataggctgccagcggaaaaccagagcccacagaatccaccccgccgtcccagtcaccacgatcaatgcgccaaggaacagggcataggaagggtcatgattcttttccagcagcggggcggagagggccacgaagaagaacgtggccttggggttcatcaggttggtcaccagggcatcccggtaaatgccggaagccgggggaatatccccgctcccggcaaggctgcccttcctcccccgcggccatatcttccacgccaggtacagcatccagcaggaggcggcacagaaaagcaccagccccagggagctgtgaaaaacggaagcccccaccgtgcaagccagcgccgcgtgggcgaccacccctgttccaatgcccagagccgccatcaccccggcgccaaagccgtaagccagggtgctccgggtgacaaaagcctggtcagggcccggagacgcctgggagagcagcaggattcctgcgaatatgagttcttccgtcatgggataaaacggccttatgccctgggatgcgcctgcctgtaaacttccgccattctggcccgcgtcacatgcgtataaatctgagtggtggacagggaggcatggcccagcagttcctggacggaacgaagatccgccccggcatccagaatgtgcgtggcaaacgtgtgcctgatcttgtggggggaaatggtgaaaggaatggaagacagcttcacgtacttgtccagcatcatctgaacggcgcgcgcgctgagccgggttcctatgcgggagacaaacaggggggaattcttaggcaggcaggccatggaggcataggcctccagagccgccagcgcaggagcgcccacaggcagaatgcgctccttgcgcccctttcccatcacccgcaccccccggaaacggtggtccacgctgctgacgtccagccccaccagttcactcaggcgcatcccgcaggaataaaaaagttccagaatagccgcgtcacggtagggaagccacgcgggggcattcgcaggaacgggcgtcttgtacggcagctccagcaattccagcatctggttaagcgtcaggaaaacgggcaggtttttctttttcctggggagggagacgcccgtcatcgggctcgcttccaggctgcgccgccgcatcatgaaacggtaaaaactgcgcagggcggcaaacctcaggcggatggaggcggtagcggcctcatccttcagttcctggaacagccagtccctcatctggtccggagtacagttttcccaccccgtgaacatcccgtccgcccaggcccggaactggcgcagcgcgcgggcatatacctccaccgtatggggggaggcctgcttttccacctccagatattgcaggaaggcctgttccggttccagagggttctccatcatgaagaataaaattattccgtgcccttctccttttcctccccgctgttcacgggagcctccttcagcagcacttcactgatattcgcccggatgaacaggtcaatgtcgtccggttcctccatggcatacaggggactgtccttatggctgtccgccagagcctgctccttctccaccgggctgagcacgccatcctggtccaggtcgtaaaggtccatcatctccttcattctggcccagtacagagccgccgcatccttcatgacagcggcatgctcctccggatcaatgcggccgtttccgttggcgtcatacttctgcatcagcatgttccgggtcagcaggaacaggccgggagccaccatgaagcgcttccgggccgccgtccggatttccaccatgggcatttcccgcccttcgccgggaggggggggaggagggggcagctcgccccgcttgtccggggcggcgtccggcctgcgggaaccgcggcgtttctccacatgctcccggaaggccttgtactcttccggagaaagctttccgtccccatccttgtcaaactgcatcaggaacttcttccgggcttccctttgcgcagcgcgcgcatcctccaccagccgggccttgtcctgttcggacaaaatgcccgttcctgtgctgtcataccggcccagaaccatctggcggatcaacagggttacctgaagacattccagtccgggcctgggaacaggctccccttccctgcggtctacggaagccgcggtctgacctgccgcaggcggcagaaaaccgaacgccagcgccgcggaacaggacaggatgaacgtgtgaggcaatctcatgatcattcttattaaccccgccgggaaaagacggtttcaaaaataaacatccgcccttgccgtcaggcgacacgggcggatgctgaaaacgtacggaaggcggaaaaccttacttctccacttgaacgatggcgttcttttccagttcaaccaccacgccttccgcaatcttgagggagacggtgcggtcattcaccttttccacaaatccgtgcagcccggcgttcgtgaccaccttgtccccgcgctgcagggccgcgatgcgcgcctgctgttccttctgggcctttctctgggggcggatcagcatcacccagaacaggacgatgatgatcacaaacatgaacatggggctgctgagaatctgctggaacatattggagggttcctgtccggcggcggccgccgcatcctgagcctgtgctaacatgaagatattcataaaatgtcgtttgctttgtaccgcgcgatgaatgaatccttgaaggagccgaacgtgccggcggctatggcctcacgcgcctgagccattagccggagatagaattccagattctggaaagaaagcaatcttaaagcgagtatttcaccggctttgaataggtggcgcacgtaagcgcgggagaattgtgtgacatgcggatgcccttccgggtcgatcgggcgggaatccgccgcccagcgctggttcttgatatgcatggggccgtccggagtcagggccacgccgtggcgcgccaggcgggtaggcatcacgcagtcaaacatgtccacgccgcgggcgatcatctccaatagctggggaggcgtgcccagccccatggcataccgcggcttgtcctccggcagccagggtgcggaatggtcgatggcccggagcatctcctcctccggctctcccacggaaacgcccccgatggcataaccgtcaaactccatggcggccagttcctccgcgcacctctttctcaaatccgcatacacggacccctgcacaatgccgaaatggtgctgacgcccttccccggaacggggccggtgctcctgcacccagtccttgcagcggcgcgcccaccggagcgtatagcccagggaggcttccgcgtacttcctgtcgcagggataaggggggcactcgtcaaacagcatggcaatgtcactgcccaagtccgcctggatctccatggaacgctccggactcagcatcatgtacgcgccgtccagatggttctggaagcgcaccccttcctccgtaatcttgcggagcttggcaagggaccagacctggaaaccgccggaatccgtcagaatggggcggttccaggaggaaaaccggtgcaggccgcccatttcccggatcagggcggaaccgggacgcagggacaaatggtaggtattccccagaataatccgggcccccagcgtctccaaatcctgcggatgcatggttttcacggaaccctgcgttcccaccggcatgaagatgggggtgggaacccggccgtgcggcaaatcaagcgtgcccaggcgcgcagccgtggaggaatctttctggtgaagtgtaaaaggcatcggaatcaggctttctgcaatttaatgaagcgggcgcggtaaatcggttttcccatggactcccattgaagctggaaatccgtccggggataaaaaaactcatcatcctcccaaccggaccggctgaacaggccgctgcgcgccacatggtccagcacccacaggaaatactcctcatgatccgttttaaacaggaactccccgccgtccgccagggaacggtgcagcacgggcagaaaatcatcctgcaccaggcggttcttgtggtgcctctccttgggccacgggtccgggcacaaatagtgaagccgggaaacgcagccgggccgcaccatccattccaggaaataacggctctccacccggagcaccttcacgttttccaggccgcggacggctgcccgggagcaaacgccccgcacgcggcccaacagccgctcaatgcccagaaaacggcgttccggataatgggccgccatctggagcaggaaccctccgtctccacagcccagatccacttcaaacgggccgtccgttccaaaaatatcggaaggcgccagcaccttgaaaaaatcgtctggaatgaaggccggatctgtcatgggaatcaacgtgcggataagatgcgttacaaaacggactctgtcaaatgagaagagcccctccccgcaaacatggcgggaagaggcccggcaaggcggaacggccgcacccggacagccggacggcatcagctccggtaataaaggcggttgtaaatcttgcggtcaaaacgataatagcgcgcggcgcggtgggccacgccctcctccttctcatccagcggcacaatgtagggacgggaggcaatcttcttgtggaaattgcgcacgtccatgggcttgccgtgaatctcctcattcagccgccggagctgaagcgccgtaaacttggcgggcagcatgtcgtaaatcagcgcgggctccttcttcacggaagaacgtatcctctccagagccagatcaataatgtcccggtggtcaaacgccagctccggcaggccgtccacgggcacccagcgggttttgtggctctccatcagcttgcgcagcttggtggaaatcctcagcatggccatgtaagccaccgtcaccaggcggcctatcttctggccggagatggcctccacccactccctgtccgccggattcttgatgcgcgacggcgcgccgaaggtatggaactgctccaaatggggggaagacatgccggtcatgtcaaacaggatacggcgtgcggcggcgtcaagttcctcctcctcataaatcaaatcaccgggcagcttggaaatagcgccggtatggccgggtgcgacatgtgtcttttcaaccagaaggaccttcagcccttcctcatcgaacccgatcaacacacaatccactgagagatgcggataaaatgcctgtctgctcattatgttatctattatttgtagtaagttcccagaatcgcaccaacgctacgcaagcggcccagtcaagtcaaccaaaatcaaaacaagatcggcaaaggccattccatccctctccctgtccctgcggcccggctgccgcagacacgccagcattcccggcagcggcgtcctctccggagcgggaaaacgcatcggcgtcttgcattaccccatcttcccggccatataataaggtatgcagacgggcatcatcaggggagcggccatgctggccgggctgttatggctggcctcctgctcctcctcacccaaaagccgggactatacgggctacatgacccgcccctacaccatccggggccaccgctaccaccccatgagcgtggaacaggcgctgtcctatgaacaaacgggcatcgcctcccattataatgaatgcgcgctgtgggggctcgtcagcggagaaacggccatcggggaaaacgtgcgcccctggcacctgcacgcggcgcatcccaccctgcccctcccgtgcgaggtgctcgtccagtccctccgcacgggaaaaaccgtgaaagtgcgcgtcaacgaccggggccccttcatcaaaaaccgcatcattgaccttagtgaaaaagctgcagaacggctggacatgaaacaccacggactggacagggtcagaatcaccgtcctctccgtgggagacgggaaatggaaaagggaagcgccgccctacgccacgccggcctgacccttcacttcagcacgttctgcgtggtcttgaaatgcatcttggccaccttcggaagcatctgctccccatgctgggccaccaactggcgagcggcctttaccacctggccggaagcccccagcggcagcttcatgccggcggcctctcccgccgcatccatccagttcacaaaacgttcgcgcgccagaatggacgccgcggccaccgccacgtcactttccgcccggacgcgctgttccagcctgatggacagctttttggccgccagggcccttttcagtacaaacggattggcaaactggtcgctcagcgccatggggcagtccggcaccttggccgccaggccctcaatcaccgtggcatgcccccaggccagaaaacggttcaaattcttgaactccggataaagctggttgtacctctccgggccgatgctcaccagatggaaccggatgccgggcaccctgcgtatcccttccgccagggaacggattctggaggaagaacccaccagcttgctgtcacagacgcccagcttgcgcaacgcggcgcctatgcgcccgtccgcataaacaccggccaccaccagagggccgaaataatcccccttgccgctctcatcaatgccgaaatgggctcccttacccccctcatcctcttccgcttcctcctgcagtgacaggaggccggtcacctgcggctccagcgtaaactctataaaatcgtccgttcccttcccctgtaaaagaagcttgttcttcttctcataaaccgtcaccagcagggaaggcccggcaaaggaaaagcgcgcgtagggaacctcccttctttcaaacccctttccctcaagaatggactcaagccttccggcctgagcgtcagtcagcatggttgtaaacgtggtgcgcatatgctccctcccggcgccggaacgcccggcgggaaataatggaagcattcaaaccgttccggtcaagcaaaatccccgcatcacgcagttgaggacgcaaaaatcaagcatgccacggattatgtgattttttaggagacaaatcacgcacgctgaactataaaactcatacattcatatcattctgcactccatatggctaaaacattaacaaaacgagacctcgttaacaagatcagcgccgaaaccaacttcacccagattgaagtgttcgacatcgtacagcgtgccgtggacattatctccagcacacttgcggaaggtgaccgtgtggtgattcgcaactttggtaccttccaggtgaaggaagtgaagcccaaggtaggccgcaatcccaagaatcctgaccaggacgtgccgattccggcccgctccgtcgtcaaattcaaggtcggcaaggaactgaaggaccaggtcgccaagctgaccgcctccaagtaatccccgcagggaccagacaaattacaccgggcgtctccattcagcgatggaggcgcctttttgtttgcaatttgcgcggcaatcgggaatatagggaaccgtgagcatgttccggatacagcacattctcctgatcgccgccgcagggctctgctcctgcgccaccgaacgtacggtgaccaccagccttcagcccaaacagcgcccggactcggcaaaaacggacgcggagctgatggatgccctggaggcgaaattcgccggcggcttcggccagcagacggacaaggaaggcaacaccaagatggtctcccagaaacggagctcctttgaaggactccggtacaacggcgacatgtcccaatttgagaaaaaggcctttgaaaccaccgcctttgaaaaaaagaaatttgacggagccgccacacagtttgaaaccaggaaatgggacggcgtcaaatccttcacggatggaaaactggaaacaccggacttcattgcccgggccaagggcgtgaatacccagtcctggcaagatgcctccaaacaatacgccacgcagcaatccgaccttcagggccgctcctggaaggaggcggacaaacacctcggacgcaccgtcaaccgggacattgaagccaagcggcagagctttgaacaacccaccatgatgagcgctcgccaggcccaggcccgcaccatccaggaaacacgggaaatgatggggcggacggactagcgcgccaacgttccggacgtgatcccatgccacatttcaggttcgacattgttttcagccgccctctataatcccgcccgtgagtgccaaagacgttccaccttccatcaccctgcctaccagcgactactataccattgtcaaaatgagcaatcatgccgtcgtgggagtattccgccagcatgtctttgcacgccgcggcacgcgccgttacgcaccccccattccggaagagcacgactcctactgcgttaaaagaactccggaacgtgtcatggtgcaaatctttcatgacggcaacgaagtttaccgttgcatttttgtgccgcctgccgattattgacggcaggacaaccatgaaagcgccttttttcagtctggccttctgcctcattacaagtctgattgcagcctgttcctccccctcgggacccaatgcgtggacgccggtcacttccggcccaccgcgtgcgcccatccctcagaacgaagttctggtcattgatgaataccccatgggggaatataccaacgtagggcactttaacggtcctgaagggcgcattgtccatgtctccatggaagacaaggaactgatcgactacttcaccagggaggctgccgccatgggcggcaacaccgtcgtcatcagggaaccgcgcatccgctaccgttccggtgaaggcaagagcagccgggtggacgtcatccatgtgcgggaggaaatgggaacgcacggcgcggaagacctgggcatggactcgctccccattgatgaagaatccctgcggatttattaatccggccccactaccctgcgcgatctcccgcccggggcttttttcagccttttctattggccgcgccgcaatgcgggcactccgcatgggaattcccgtcctccacataaaaccggaacccgcatatccggcaccgcaccttgcgcctccggtccaggaaagaccgtacccaccccattgccaggcaaatgaacactacggcgcaaaaaccgccggacgccagcaaaaacaggcgcagcaaaaaatcgtgaagggtcatgctcacggctcttcctccttccattcaatggacatggtgccgctccgcggctcccgggacggaacccagcgcagggagcgggcaaacctcatggcggactcgtccgctccattgctgccggaagactccagcagcagcacctgggagggaacgccccatacgtccactaccacaaaaaactcgcttctcagccccgtatggtcctcgctcctggaaaaaccggacagggagccggctgtaacaatccggccgtccagccccggagaacaaaaagacaggtagggaatgcacgtgccggaaacatccagggaaggattcatcatggcgcgtatatggaaatccggatgctgccacatgcgccacacctggtccgccacggtggggacggacacggggggaagaggagccagaggcgtatcggcggagcgcagggaaggcagagtcacgcccgtttccccgatcgggccggctgtcaccggattagcccagacggggcccctcacgggcagcggagtattgcgcagcacatactggtgcaggcgcggattatccgcaggaagcagaaccacggcgcccggctggtccccacggcggcggactcccggcacctccacatggacaaacacggcggccacggatgcgcaaacgccgaacaaaagcatccacagcaaaatgcgccagcgcaaaatgccggtctcccgccagtcaaacgtcaaccccacgtggaggtcgaaaatcttggcccggctctttttgttcagcttcatgcggcagaatggaaaaaaatcaatccgcaggctcggcggcaatatagcacgtcattcccttggcaagcaccatatccaccaactgctgttccagagcccgagaaacggcggaatccagccgcaaggcaatccccacgcgtccccctccatccccctcgttctcccgggaaatccggtccaattctgcggaaacgccgggaaggccgccttcaatcaggcggttcccaatgtaaaaagcgggctggtcgccggccgtgacggaaataaactccacatcccccacaatattcatcaggaaacgggaggacggggccttcacctcatacccgtacgccatccccacgcgggaagtcatgatcgtcagcacgcaaacaagcacgaccaaatccagcaggacgaccacctgcatgaaaaacgccccggtgggcaacgttgagcgcgtcttgatctgcatgccttttttccttccctgttacgcttacactccccgtccggccatgctctccccctcctcgcgcctctggcgggcgtcgcacaccaggcacacggcctccgtgccggcccgttccagggaatgcacgatctggcgggagcgggaagccaggtaggaataaaacaaataagcgggaatcgcaatgctcagcccaagggcggagctcagcagggcctggtaaacggcgtccgacatggcgagggtgggggccttcccttccaggaggcccggctgggaataaaaacccaccagcccctgaatcgtccccaggacgcctatcagcggactcaccgtagccaccaccaggaggccgcggatattcttctcaatctggaacacctccatctgcacggaatcctccgccacggtccggagctcttcacgccgcaatccggcatgcgccagcacggaggcaaccacacgggccgccgggccaggcagaatggaagcctcatgccgggcttcatccgtctttccggcattcaccagcttggaaatgccccttaaaaaatccccggtattaatctgaatcctgtggaaatataaaatccgctccgcaacaaccgccagcgcgtacacggccagaatgcttaaaacccagaacaacggccctatcttgatgatcaattcattcataacccactttctcgcgtcagatgatgcacactttccatgtaaattcaatccaaacctatgtagcccggcagccgagcttctgcagcagccgcgttccggcccacaataaaacggcgccgatccacagcagggaacccaggcacaacagccataccgcatcaaacaggcacatgccggaaagcagcagcaccacggccgcctgaacccggggcctgcccgcttcacgccgggccaccatggaaatcaggcaggtaaacgcaaacaggccgaaagcataccacagcagggacgcgggcagcacgggttccccggccgcatgggcaaacaccagcccggcggccagcacccacagcccgcggcacagccccatcagaaaaacggagccgctccacaacttgtgaaacatattgtacagggaaatcacgatcagcagcacagcgcccgcggcaaactccccgcccagcgccatattcagcaccaggccggacagcccggccaccagggacagcagcctcagcacggacacgctcaccgcgccgcacggcacgggacggtccggataacgggaagcgtcccacctggcatccacacggtcattctcccacatgccgtacaaataaaagcacagccccatcagcaccacgcccgcatacaggccggcaggcggcagctccgctccccggacggcagcccacgccacggccgcattggtgaacagcgtgggaatattggccggacgggaggaacggatcactcccctcaataaacggcaatcatgcatcgacgcacactgtatagggaaaaacggcatttaccaagcacatccacagtcagcaaaagtgtggagacggccctccctaccatgcagggcggtatccatacatacccagaaatagattgtctttacagggctgttccctatcatccggaaacattaaagcttctttttctcccctccatgaatatcagaacccacatccaggcgcttctcatctgtaccatggccttatctgcacaggcgcaaagcatcgtggattcccgggcctcccttccccgggccgttcagctccacggggatgaaggaagagaaacggtgcgtccggacgaatccaagcgcatctccccgaacgaagcgccggcctcccgcatgcagccccagcgcatcgtcaaccggatagcggccaccgtcaacggtcgcccgatcacggccaatgaagtcagcgtgcggctcatgcccatcggcgcgcaactcgcggcccagtaccccaaacagggtcccgaattctacaaacagctcgccctggcgaaaaaaaacatcattgaagacctggtggagcgcgaactgctccgcaacgaattcgaaggcatgggcggcgtcatccgcgactccctcattgaccaggaaatcaaccgcaccatcctgaccaccttcaacggtgaccgctccgctttcctgaaaaacctcaacctctccggcatgaccatccgcgccttccgggaaatgacgaaaaaacagctccaggtccagatcatgcgcgcctccaaatacgaccaggaaataccgcccaccccggaagaaatacggcaggaatacgaggcaaccaaggaacaataccgggacctgaccaaggacaaaatcaaattcaagaaaatcttcatccccatgctgggggacgactccgcctccacgccggaagtgcagctcaacctggcggaactcatcgccaaggaaatcaaatccaaaaacgccacctttgaagacatggccaagcggtactccaaagacctctatgcggaaaaaggcggcgattggcccgtcacggagcgctccacgctctccccggaatccgccgccatcatctttggcgcgcagcccggcgaaatcatcgggccgctggtggactccaccggcttcaccatcgtgctggtggaaaaaaaggaactggcccctcctccgccactttccgccatcaaggagcagatcgacatgatggcgcgcaacaagcgcagcaatgaacgctataaaaaatgggtggaacgcctccggaaaaaagccatcgtcaaggtgtacatctgagttcctcccgcctctcccctttcccccgttgccggaccggcccattcaacaaggccggtccggcattctctttttcattcccccggttccagtccatccaaccgattcattcgtcctctttctttgaccgggggcagcttcctctcaaccatatttccggaagacgcctccatacataaccggacggcggctgcaagtcatcccgccgaatacgtgaagccctgctgacggaatccgtgcagaaaccgcattctgctgaataaaaatcttgcaagattgcagatttccagtcgtaataccacagatatgttcaccaacattacacgcacgaccctctgcattactgcgttcagcatcgccagcctcatggcggcgcccctggacgccaccaaaacggagagcctggattggaactggaaatttgcccgtttcggaaaaatgccggatggcagcacacagccggaaccgggaaaagccatgggattcgccactgccaccagtgaggaatccggcaatccggcggacaatgccgtggacggggacaagtccacccgctggtgtgccgacggcggcaaaagcggggagaaaatcactgtggacatgggacgccccgtggacgtgaaaaccgtcaacatcctgtgggaaaaacaaaacaaccatctcttcaagctggaaggctccggtgacggaaaacgctggacgaccattgaagacaaaacttccggacaaaacgactccaaggaagacacggtggaaaacaaaaccggcaagccacgctacttccgcgtcaccgtcacgggcaacaaccagagcaactgggccagcatccgtgaaatcacctttaaaaacgacaagggggaaatcatccgcccgcaggccgccgccggagccagcaagacggaccatccctccagccccggtttcaacgacaaaaactggcgttctctgaacctgccgcatgactggggtgtggaagggccataccgcatggaccttcccaatgaaacaggcaagctcccgtgggacggcatcggctggtaccgcaaaacgctggaagtaccggcggacgccaagggcaaccaattctatctggactttgacggcatcatgtcccgcccgaaaatctatgtaaacggagacctggccggcgaatggaaatacgggtacggctccttccgcgtggacatcacgcccttcctgaaattcggccagaaaaacaccatcgccgtcagggtggacaatccccccaactcctcccgctggtatccgggcggcggcatccaccgccatgtgtggctcacggaatccaaccccgtgcacatcgaacactggggcgtcttcgtcaaaaccccggaaatcactaaatcctccgccaaggtggaagtggacaccacggtgaaaaacaccacggacaaggccgtcaccccctccgttacggaagaaattctggacggtgacaaggtagtggccacaaccaccaccaggggggaagcgatccccgccggggaaaaaggcaaggtcaccagcacgctgacgcttaaaaaccccaccctgtggacgcttgaggccccccatctgtacaagatgaaaaccacggtcaagctgggtgacaaggtcattgaccagaaactcacgaactttggcgtgcgcaccattgaatggaagcccacgggcttctacctcaacggggagcgcgtgcagctcaagggcgtctgccagcaccatgacctggggcccctgggcggagccgcccatacgcgcggctatgaacgccagattgaaatcctgaaggaattcggcgtcaactccatccgtacgtcccacaaccctcccgcgccggaagtgctggacctgtgcgacaagatgggcatcctggtcattgacgaactcttcgacatgtggcacagcgccaaaaaagggcaggactaccacaactactttgacgaatggcatgaacgcgacctggtcaacttctgccaccgggaccgcaaccatcccagcgtcatcgcctggagcacgggcaacgaagtgccggaacagggcaacaaaaacctgcatagcgtctcccagaacctcacggacctcttccaccgggaagaccccacccgcaaggtgacggccggctgcaatgacgcaggggccgcccggaacggcttcgcggacacgatggacgtctatggctacaactacaagccctgggcgtacaaggccttctccaaggaccgcccggaccagcccttctacgccagtgaaacctcctcctgcgtcagcacgcgcggagaatacttcttccccgtggactggaacaagagcaagggcttcttcctctaccaggtcagctcctatgacctctacgcccccggctgggcctaccgcccggacgtggaattcgccgcccaggacgacaaccccaacagcgcgggcgaatacgtgtggacgggcttcgactacctgggagaacccaccccgtacaacctggacgccaccaacgccctgaacgtgccggaaggtccggaacgtgaaaaactgatggccgagctcaagaagctgggcaaccgcgctccctcccgcagttcctacttcggcatcgtggacctgtgcggcttcaagaaagaccgcttctacatctaccaggcccactggaggccggatgtcaaaatggcccacatcctgccgcactggaactggccggaacgcaagggccaggtaacgcccgtgcatgtctacaccagcggggatgaagcggaactcttcctcaacgggaaatcccagggcgtccgcaaaaagggcaccggtgaaaaagaccgctaccgcctcgtgtgggaagacgtgaaatacacgcccggcaccctcaaagtcgtcgtcaaaaaagacggcaagccctgggctacggacacggtaaccaccaccggaaaaccggcggcgctcaccctcaagccggaccgcagtgaaatcaagggagacggctatgacctctcctacgtcaccgtggccgtccgcgacgcgcagggccgcatggtgccccgcagcaaaaaccagctcaccttcaaggtaagcggccccgcggacattgccggcatctgcaacggcgatcccacagacttcaccaccatggcgaacccggaaaacaaaaacatcatgaaaatcaaggccttcaacggtcttgcccaggtcattctgcgttcccgcaagggtgaatccggaaaagtgacgctccaggtcatctccaacggcctcaagccggcccagacgaccgtgacggtcaaataaatcctgaaaaaactccgctcaggccgccggttcccgccagggagccggcggctttttcatactgctgcccctggggcggaaagggccggtttttccacccatcccagggcaggtagggattgaaagaaaaaaactttatggtacccttttgcccatgtctgatctgcccaaagcatatgatccgtccctagtggaagaaaaatggcaatcccgctggattgaagaaggttgtttcaaggctgacccggcttctgaaaagcctgcctactccgtcgtcattcctccccccaacgtcacgggagtgctccacctgggccatgtgctgaacaacaccatccaggacatcctggtgcgccgcgcgcgccagaaaggatatgaagccctgtggctgccgggcacggaccacgccggaatcgccactcaggtacgggtggaaaaggacctcaagcagacgacgggaaagagccgccatgacctgggccgtgaagccttcctggaaaaagtctgggaatggaaggaaaaacacggcggcatcatcatcaaccagctccacaagctgggctgctcctgtgactgggaccgcgaacgcttcacgatggatgaggaatacaccaaagccgtcgggcaggtattcattgacctcttccgggaaggcctcatctaccgcggccgccgcatggtcaactggtgccccgtttccctcaccgccctctccgatgaggaagtcatcatgacggagcaaaaaagcaagctttacaccgtcctctacaagctggaagacggctccggagcccttcacgtagccaccacccgtccggaaaccatcatggcggacgtggccgtggccgtcaacccgaaggacccgcggtacgcccacctcatcggcaaaaacgtcatgcgcccgctcaacgccgcccccattcccatcatcggggatgaatacgtggaaatagaattcggcacgggcgctctgaaaatcaccccggcccatgacaaggccgactttgaaataggccggaaattcaatctggaaatcatagacatcctcacccccgacggccatatcaactgcacggaagtgccggaactgcacggcatggaccgctttgacgcgcgccggaaatccgtggaaatgctggaagccgcgggcctcatggtcaaaattgaagactatgacaacaaggtgggcttctccgaacgcgccaacgtcccgatcgaaccgcgcctctccatgcaatggttcctcaaatacccgtgcgtgaaggaggcggcggacgccgtggccggcggggacatcaccttccgccccgcgcgctgggcgaaaacctatgcccactggctggaaaacatccaggactggtgcatctcccgccagctctggtgggggcaccgcatccccgtctggtaccggaaggacaaggcggaagaactcaggaacgcccctgctctggacgcctccgccctggagcaaggcttcctctacgtgggaaccgagccgcccgcggatccggaaaactggactcaggacagcgacgtgatggacacatggttctcctcctggctgtggcccttctccaccatggatgacgaaacccgcgccaaattctaccccaccacggacctcgtcacgggaccggacatcatcttcttctgggtggcccgcatgatcatggccggctaccgcttccagcatgacaagccgttcagcaacgtcttcttcacgtccatcatccgcgacaaaataggacgtaaaatgagcaaatccctgggcaactccccggacccgctggacctgatcgccaactacggcgcggacggcctccgcttcggcctcatgcgcatcgcccccacgggcacggacgtgcgctttgacgaaaaccagatcggcgagggcaggaactttgccaacaaactttacaacgccacccgcttccgcctgatgcagggcgcggcggaggaagacgctgcgccgcactactcccccgtgcacatctccatcatctccaagctcaagcagctccatgcagatgtggaaaaagcgctggcggactacgaattcaacgccctcatccagaacctgtaccaattcttctggaacgaatactgcgaccgcttcctggaagccgtcaagggagatttgagggacggagcggaccctgcggcacgggcggccacgctaaccaccatggacacggtgctcaggcactacctggccctgctgcatccggtcatgccgcacatcacggaggaactctgggtttccctgggctttgcggacgccaacggcggccttccgctcatgcgcaccccgctcccctccgcggacggtcttctggcagggctggacgaaacccgcatcacgctggcgaacacccaggctgcggctctctatgaaacggccaacaaggcccggaacctgaaggcggaatacgacctctccaacaacaaaaacgtcagcttcatcctgaaaaccacccatgacgtcccgctggacatcctctcccggctgtccattctggcaaacgccaaatccgtcacccgggacgctgcctactccgcccccaagggaacgcctgcggccctcacgccgctgggagagctcttccttcccctggaaggactcattgacgtggaagcggaaaaggaacgactgggcaaggagctggacaaaattgccagggaaatcgccaaatcctcctccaagctgggcaatgcgggctttgtagaaagagccccggcggaagtcgtggaccaggaaaaagcccgtctggcggattgggaggcaaaacaggcccaactgaaagggatgcttgattccctttcctaatcatctattcttccgggaatgaatgaccttcaacagtactttgccggtcgtgagcaattcattgaattgctggaagcggtgggcatacgtactcttgaacaattcgcttccgcggaccctttcaccgttttgcctgaactccatcaggcaaaacggatgctgaaactgcgcacggaaatacctccggctcccgttttcagggaatgggtgaaccaggcgcttgcaatgcccatagcgccggaaccggctgcactgcacgcttccacggacggaagcctcccgcttgccactcccgtggtggaactggctccggcggtgcagacaactccgcggacatccggacccggcagggaaaaacggccacgcccccgtgccgacggccctgcgaaacatctctccaccaaggcaaggcgccaggaagaacaaagctaccagcccgccaagcgcgtccatgtccggcaagagccaaaaacctacctgcgcaaaaagggcgtcaagcacatgactcctttccggacatggctgggagccgcctccgtcctcctcctcttcgtctgcaccctcttttccatcgcaatcatcaccctcgtgcttctcaacggggaacgaggctggttaatcatcagcctatgcttcggcccctggtttctggcgctgatcctgtatctttccctggcgttgccccggaaatgtagcgtatgccgcgcccacgtcttctcctttaaaaaatacacccgcaacaaggcggcccatcgcatccccctcttcggctacgtatttgccacggctctgcatatattcctcttccactggttccggtgcccggcctgcggttcctcccagcagttggaaaaaacccgcgcggaacagcacaaacactagcgtgcgcgtggccccctccgccttggcctccccgggatctcccggcctttctcctgcgcgtaacgcccggaaaaaggctcctttcctgtccggcggcagcaagaacagcaatcccgaacaacgcgtttcccgctctttgccctatccctgggccccaaatccggattcagacgggacaaacagccttccctctccgaattctctgaaatggccttctatcagcggttcccgcatcttccgccgtcatcccctgcccggaagcggaacgggcgcatctcaagtctcttggctcccggcacgccccaagacattctctcagacagaccgcctgaggcccttgcctcccttccgcctgaaaaacccgtatcgacatcttcatgccgtgcgatgtaaaaacacgttcccaactcggaaacacgggaatccatcgggacgtttcaaaaacaggaaaaaacctgccccataaactattccggactctcttcccagacgcccggcaaactcgtagttccggtgactttattgtttctcatgaaaaacgcctcaaacacacattcaccggaaaaatacgggcaacaaaaaaacgccgtcctctcttcagagaacggcgttcaaaatcctgaggtgtctcggttagagcacttccggagcaagggaaacaatcttcatgaacttcttttcacggagttcacgggcgaccggcccgaaaatacgggtgccgcgcgggttgttgtccttgtcgataatgacgacggcgttgccgtcaaaacggagcacggagccgtcatcacggcggatcggggcggcggtgcgcaccactacggccttcaccacagtacctttcttcacggaagcggtgggaatggactcgcggatgtggcaggtaataatgtcgccaatgtgggcctgacgggtgcgcttgccgatgacgccaatcatcttggcggagcgggcgccggtgttgtcggccacctggactagggattccatctggatcatggtatcaaatctcctttatttaatggttgattcctgattagtgggtaagcacttccaccagttcccagcacttgagcttggaaagcgggcgggtttcaacgatacgtaccttatcgcctaccttggccgtggaattttcgtcatgggcatagaacttcttgctcttcttgacgatcttcttgaacttggggtgcggaacgcgggcaacgtattccacgacgatggtcttgtccatcttggtggaggtcaccacgccgacgcgcgtcttgcgaaggccgggcttcttggttgtttcggtttgttcggacattggattctaaaagtgttagaatattctgttgttaccggaaatcctcagtttacgcttccccggtttcacccttgatggtaagggcgcgggcaaggtccttgcggacggtgcggattctctggttgttttccagctggccggtggcctgctggagacggagattgaagagttcttcacgaaggctgcgcaccagagcggaaagctctttggcggacatagcacgaagttctttgggggaattcttatcagacatggtgatgagtagctttagtgttgaacgccttgacgatagacgaagcgggtcggcacgcccagcttgttggaagccagacgaagagcttcgcgggcctgggattcggtcacgccgcctacttcaaacagaatgttgccgggacggacaacggccacccagccttccacggcgcccttgcccttacccatacgagtatccgggggacgggacgtaaaggacttctgcgggaaaatgcggatgaacaccttacctttacgtttcaggtaacggttgatcgcaatacggcaggcttcaatctggttgttggtgatccaaccgcggtcgagcacctgaaggccgaagtcaccaaaggcaacataggtaccgctggtggcattgccggaacggctgccgcggtgcatcttgcggtgcttcactcttttgggcattaaaggcatatcttattcctccttgtgttaagtgtgatgaacaatgtgatggcggctttcttaggcacgcggacgacggggaccgcgggggccggacgggcgtgaggtctgctgggagacgacttcatcgcgcttgttgacccagcacttcacgccgatgatgccgtacagggtgcgggcttcggcgaaaccgtagtcaatcggggtgcggagcgtctgcaacggcactttgccttcgcggtaccattcggcacgggcgatatcggcgccgccgagacggccggcgcagcggatgcggatgccgtcggcgccacgttccatggctacctgcacggcgcgcttcatggcgcggcggaaggaaacgcggcgttccagctggacggccacgttttcagcgatgagctgggcgtccgtttcaggagaacggatttccacgatgtcaatgttgacctgggtggaagcgccgcacaggccctggaggtactggcggatcttttcaatttcttcacccttgcggccgatgacaagacccggacgggcggtgtggacggtaatgcggacgctgttccaggcacgttcaatcacgatgctggagacggcggcggacatcaactgttccttgatgtacttgcgcatcaccaagtcttcatgcagcttggtggcgtaatcctggcccgtggcgtaccacttggaacgccagtccttgttgacggcgaggcggaacccgattggatttactttctgacccatgatattagttcagctatatgtgtgttagattggaatgacttagccttcttgatcggccagtacgacggtgatatgggatgtgcgcttgcggatcatgttggcggatccacgggcgcggggcatcgtgcggcgcatcgtggggccttcatcgaccatgacggacttgaccaccagcgtgtcaacggacagttccgcattattctcggcgttggccaaggcggacttgagcgtcttattcagcaggtaggcacccttcttgggggtgtaggacaggatgtcggtcgcctgggagacggacaagccttgaatttcttgagcaatatcgcgcatcttcttggcagagatgcgggcgtatttgtaaacagctttcacttccatgggtttttcctcgtagtgcaggttattgatgaagatgatttagtcgttggtttttactgaggcagaatctccgacgcgcaccggctcggcgggcgccgcaagtttctgaacaagcgcgccacatacttccttgcggacgtccgtgactacggcttctccgatggtttgcgctccccgggtcacctgtacgggcatcccgacttgcatccctgccgttctgccggcgttcagcaccactactccggattcggagtcaatgctgagcaccttggcttccgccagggttcccgcgccatctcgcacgggctgttgcctgtatcccagaacggactccagcaggcgcagggagctttccactgccgtccttgcatttgcgtcctcggatatggcttgtttcatgtaggcgaggatggctccggagagcttgacggacgcctgctccagccgctgaatgcggtcattggaggcttcgatgtctgccaccgcctgaatcaggcgttcctcactattacctagcgctgcgcctcccaaagcttccagccgggtacggatgtccaccagctgggcggccgccttgtcggcgtcgctgcgggcctggacataggatgccttgagggccgcattctgcttttcgagacgctcgattctgcgcgtcagtgccgccgtatcctcttccgctccctgcagtatcccgcccagccctacaagggtggtaagggaataggcaaggatggaagaagagttcgacatgttgattgttaacttactgattacttcttaccgataccgccgtgctgtttgaagacacgagtcggggcaaattcaccaagcttgtggcctaccatgttttccgtgacgtacaccgtggcaaagttcttgccggcgtgcaccaggaaggtcagaccgacgaagtcaggcgtaatcatggatgcgcggctccaggtcttgatcggcttgcggtcaccggtttcaagctgagcgtcgatcttggcgagaagcttttgactgacaaaagggccttttttgagagaacgtcccatgttatatgatcctagttaaagttattgtgtattggttacttggcgttgcggcgctgtacgatgacggagtcgctgggcttgcggagacggcgggtcttctggcccttgacgtggccccacggagacttgaggtgctgacgaccaccgccggacttggacttgccttcaccaccaccgttcgggtggtcgacggggttcatcgtcataccgcgcacggtgggacgaacgcccatccagcgggtgcggccggccttgccggacatttcgttcatgtgctgggtattgccaacctgaccgatggtgcagtagcaatcctcattgaaacggcggatttcgccggagggcatcttgatcagcgcatagcctgcttcacggttggaaacaatggcctgctggccggctgcacgggcaaccttgccgccggaacccggacggatttcaatgttgtgaacggaggtacccaggggaacgttcttcaggggcatcgcattgccgaccttgggagcaaccttctggccgctttccaccttcatgcccacctggaggcccgtaggagccaggatgtaggacttttcaccgtccttgtattcgatcaaggcgatgcggcaggtgcggttgggatcgtattcgatggtaagcacggtggcgggcacgtcaaacttgttgcgcttgaagtccaccaggcgatacttgcgcttgtggccaccgccgatgtggcgggtggtgatgcggccgttgttattgcggccaccggatttcttgaggggtctgcagagactcttttccggggtagaggtagtgatttcgtcaaaggacggccacaccttgtagcggttagagggagtaactggcttgaatgacttgagggacatgatagctttccttcctagtagggggctttaaacgaggtcaagggtttcaccgttggcaagcttgatgtaagcttttttccaatgagcggtgcgacctgcatcagcacggcgctgacgcttgagcttgccgtcatagttggcggtgcgcacggaagcgaccttcttgccgaaagcgacttcgacagcctttttgatttcgattttgttggcgtcgcggtcaacttcaaggaccagctcgccagtggtttcctggagcatggtggccttttcgctgatgcgcaccttcttgatgacttggtaaatgtctttcatggcttcttaagcagtacggctggcgagggtttctaaagcgttgtcaacgaggatcactgcatcagcgttcatgagctgttcaatgttcacttctgcggcggtcatcaggagaacttcctgaacgttgcggccggcaagataggtggaatcgtcaaaggaggcggctacgatgagcaccttcctggcgtccgtcagatccttgacggccttgatgaaggacttggtcttgccgtcagcgacagagaattcggcaacggtgctgaccttggaagcggcgatcagatcgcccagcacgcggcgcagggccaggcggcgggtgctcttgttcaccttcttggtgtagtcgcaggggcggggaccgaagaccacgccgccgcccacaaagatgggagcgcgcttgtcgccgtgacgggcattaccggtgcccttctggcggaagatcttcttgttgttgccgctgacttcagcacgggtcttggagttggcggaaccggtgcggcggttcgcctggtaggccacgatgaggtcatgcacggcctgggagcccttgtcactgcctacaagctggatgttggcggcagcggcggcttctaatgtaaaggtatttgcggacatagataggttttcctataatcaatgtgaggttaactaaagccttacttcttcttggcggggcggatcacgaggtaggaaccgcgtgcaccgggaacggcgccggagataagaatgacgttgtcttccggacgtacggccacaaccttcaggttctgtaccgtgcgcttggcattgcccatctgtccgggcatcttctggttcttccagacgcggccgggggtggaacagccacccacaccaccggtacggcggtgcatcatggaaccgtgggcggcgggagagccgtggaagttgtggcggcgcatcgcgccctggaagcccttccccttggaagtgccgatcacgtcaacccactggccggcggaaaagaggtccacgccgggatcttcagcaccttcagcaggcagttcggaagcttccacgcggaattccttgaggagcttggtgggctggatgcccagtttcttgaagtggccggcctgaggcttggccacgcggctttccttctgcgcatcaaaggcaacctgaatggcgttgtagccatccttgtcttccgttttgatctgggcgaaggtgttgccctttacgtcaatgacggtcacgggcaccatagcgccggattcctggtcaaacagacgggtcataccgaccttttttccgataagtcctagagccattgtagtgtgtctttctgttttttaattacttatccgggtaccaaactagatgcggatcgtgatgtccacaccggccgggagattgagcttcttgagctcatcaatcgtgcgggcggtcgggtcgacgatgtcgagcaggcgcttgtgggtgcggatttcaaattgttcagccgacttcttgttgacgtgaacggaacggttcacggagaatttttcaatgcgggtcggcaacgggatcgggccgtgaactttggctccggtgcgcttggcggtttcaacgatctcctgggaggagcggtcgatggcgcgggagtcaaatgcgcggagtcgaatgcggatttttggactttgcatggacgtgcggtctattggttatacttcaaaggtttgtttatttagccttctcggtgacgatctggtcaacgaggttctgaggcacctgttcaaagtgggagggctccatggagtaggaggcgcggccactggaaagggtacggatggcggtggaataaccgaacatttcggacaagggaaccatggccttcaggatgcaggcgttggccttgttttccatgttgctgatctgaccgcggcggcggttcaggtcacccatgatgtcgccctggtagtcggtcggcgtggaagcttcaacggacatgatgggttccagcatgatgggcttggccttcttgaaggcgtccttcatggcgaagatggcggccatcttgaatgcgttttcgttggagtccacttcgtggtaggaaccgtccaccacttcaacgtgcacgtccaccaccggataaccggcgataacgcccgtggtcatggcttcattgaggccggcatagacggcgttcatgtattccttcggaatggcgccgcccacgatcttgttttcgatggtgaggcccttgccgcgttcgttcggcttcacgtcaatcaccacgtggccgtactggccgcggccgccggactgcttgaccagcttgccgtcgccatgggcgggggcagtgatggtttcgcggtaggcgatctggggcttgccgatgtcggcttccaccttgaattcgcgcatcaggcggtcaatgatgatttccaggtgaagttcacccatgccggagatcagggtttgtccggtttcttcgtcggtcttcacgcggaaggtcgggtcttcttcagacaggcggcccagagcgttggacattttttcctggtcggccttggtcttgggttccacggccatggaaataacggtttccgggaaggtagggggttccaggcagacatcgttgtccgggctggtgatggtgtcgcccgtggtcacgttgcgcaggcccacgatggcggcgatgtcgccggagtatacggcgtcaatgtccgtgtgctggtcagcctggatctggatgatgcggcccacgcgttccgtcttgcgggtgcgggggttgtacacggtgtcacccttcttgaggacgccggcgtacacgcggatgaacaccagcttgccgacgaacttgtcagcccagagcttgaatgccagaaccatgggcttggcgtcgtccgtagcggtaatcttgaaggtttcttccgcatccagcgtgctttcagcgtgggcgggaacggtttccaccggagaggggaggtaatccaccacggcgtcaagcaggaactggacgcccttgttcttgaaggcggaaccaccggcaacagggatgaacttgttggtgatggtggcgcggcggatggcttccttgagttccttgggggtgaagggttcttccatgagaaccttttcagcaagttcgtcgtccacgtcggccacgcggctcaccagttcatggtaggccagttcggcttcttccttgagttcagcggggatttcctcaaccgtgtaggtggagcccagacggtcgttgtcggcatacatgacagccttctggttcaccacgtcaatctggccgcggagctggtcttcagcgccgatggggatcagaatggcggcggcgttcgcacccagcttgttgtggatgtcgtccagcacgttgttgaagttggcgccggtacggtccatcttgttcacgaagcacatgcggggaacgctgtacttggtggcctggcgccatacggtttccgtctggggctgcacgccggccacaccgcagaataccacgatggcgccgtcaagcacgcggagggaacgttccacttcagcggtgaagtcaacgtgcccgggggtgtcaataatgttcagctggaagttttcgccttcgaacattttgctgataccttcatttttcacctgcttccagttggtggtaacggcagcggaggtaatggtgataccgcgttcgcgttcctgctccatccagtcggtagtggtggaaccgtcgtgggtttcaccgatcttgtgaatcatgccggtgtagaaaagaatacgctcggacaaagtagttttgccggcgtcaatgtgagcggagataccgatgttgcggtagcgctcaaggggagccttgcgattgggattgtttacgtgatcggacatagtgtctggaaagtatctgtaatgatcgaaagtgaatggttcggctgacagtcgctgaagggattaccagcggaagtgggcaaaggcgcggttggcctgggccatcttgtgaacgtcgtcgcgcttgcggacggaggaaccctggttgttggcggcttccttgatttcgttggcaagagccttgtgcatcggcacgcccttgcggttgcgggcgtagttcacaatccagcgcatggccagggattcggaacgggccgggtccacttccagaggcacctggtaggtggcgccacctacgcggcggctcttcacttccacacggggcttggcattttcaatggcgcgggtgatcacttccaggggatcaatgctgtccgtgccttcgttagccatgtcgatggcggcataaacaatgcgttccgcaagggagcgcttgccatccagcataaccttgctgatcagtttgccaacaagagcgctgtcgtaacgggggtcacgacgttcgatttttctatagacgcgtttacggcgggccataatatatagtaggtaagatgttaatgtttacttggcggcaaccttcgggcgcttggcgccatacttggagcggccctggcggcgcttgtcaacaccgaggcagtcaagagccccgcggacgatatggtagcgaacacccggcaagtccttcacacgaccgccgcgaacgagcacgatagagtgttcctggaggttgtgaccttcaccgccgatgtaggcgatcacttcttcaccattggtaagacggactttagccactttacgaagagccgagttcggcttcttgggcgtacgggtcattacctggagacaaacaccgcggcgttgcgggcagctatgaagagcgcgtgacttggacttctcttccggagtaatacgtcccttgcggacgagctgattaatggtcggcatgttttcctgctttggttgtggttcgtcggtctggtccgatattcaaggcgaacatccctttcagtaagcaggaagcgcgccttttttccggaggcaaacccgatagaaaacgtatttcttgcgcctttcggcgcgtttggggacggccaatataacgtgattttatatcatgacaagtcttttattcatcttttcctaaatatttcatccgtaccattttcccctgctctttcccaagcttcattccgggttgccggcgcctttttcagcctcttccccacctggcagacctccacatgctgatagacgaaataggcgataaccagggaaacacacaaggcgattccccagaataaaactggaggccatccaccccccacttcattcccgcatgttcccgcagcatgcggagtacttcggccatgccccgcatcaccggcatgtggaacagaaaaagggcgtaagccattcccgcgccaatccccacccatttcaggagggggcaggcagggacggcaggcggacgctccacagggaggcaatgcacagggcaaagatgacggaagaaacaacgtaccccgggaatgaatagctcagggctccgattccttcatgggtggcggcagaagaagccagcagccacgccgcgcctgctccaatccaaaaccatcgccatggactcttccaccgttccatattccaggacgcacaccacatccccagcaaaaactgccacaggcggaaactcacctgataatacagcctgccgtagtccatcacggtgccgctccggaacgcagcaaaaagaacgcttgccgccagaagccacaggaacggccttttctcgtaataacggtaaagccacggaaacagcgccagaaaggccatgatgcagacgatgaaccagaccgccgccttccccatcatcttccacatcgcaagtgttggcgcggctatcagcagcctgactccggcccacgccgtcgcctgctggccttcaataagaagaacggcaaaaccggcagtccaggcaatcaacagcaccggcagcaggcgtcagcctttttccggcaatattccccgatgcttccttgtgtgaaacctccggcggatcgaacggccagaaaaccgctcaagacaaaaaagccatccacagccacgctccctccgcaattccatcccccgctgtaatggaaaaagacaaccgtcaggcacaacaaaattctcagcagatccaatccataattcctgacaggcagcatatccggaagccaacggataagcaatccgttacagactggagacggggaagcattcccctgtccacggggagcggagcagtcctttgtggaactggaatgcaaacgtccgccaggatgtaccggctttagggaagagggttcgctaacgttccctttcaaattgagatgccggagaggcttgcgccgcatcccgtccgggcacgcagttccgaaggttttccctttccatgcaaacggcttccgataggcaagggggagtcatcgcaagtttttctcccttggaaataccgcttgaccacggattgcttatccgcatccttttccggcgtttttccgtcagggcaacacggagacaaaaaaatccgtttccagccacgcaagctggaaacggattccaaagatcaactgcgggaaccgttattttttcggcgtcaccagggaatgcccggacatttcggcaggctgtttcagccccatcaggttcagcagggtgggggccacgtccgccagaatgccgttggagaggttgacctggtccttgtcgtccgccacataaatgaggtccacaagattggtggtatgggccgtgttcggggagccgtcctcattgcgcatgtgttcggcattgccatggtccgcggtgatgagcagcttgccgcccagggccagcaccttcttcacgcacttttccagggcgctgtccaccgcttcgcaggcggcgactccggcttccacaaatccggtatggcccaccatgtccccgttggcaaaattcatgatcaccacgtcgtacttgtccacggcgtccacaaacttgtccgccacttcctccgcgctcatctggggcttgaggtcataagtggccacttcacggggggagggaaccagaatgcggtcctcgccggggaactgcgtttccacgcctccgttaaagaagaaagtgacgtgggcgtatttttccgtttccgcaatgcggagctgagtcttcccggcttctgacacaatctgtccgaaaatgttgtccagctgctcctgttcaaaaacgatgggggagggatacttggcatcgtactccgtcagcgtcacataatgaaccctgggcgtcacttcacggtcaaagccgtcaaacccgggatacaggaaggcatcgctcatctggcgggcgcggtccgcacggaagttgaagaaaaacaccacgtcattatcgcgcacgcgctgttcgttgccgtaggcaaaaatgccgggcttcaggaattcatccgtctcgcccttggcgtagcactgttccacatattcggagggggaacaggtgcactgttcgccgcggcccagcacgatggcgtcccatgccagcttgttgcggtcccagcgcttgtcgcggtccatcgcatagaagcggccgataaccgtggcgattttcgcgccgtaaggcttgatggcttcttccagttggcgcatgaatccggccccgctggtgggggaacagtcacggccgtccgtgatggcatggatgcagatgtcgcgcacgcccgcttcataggcgtatttgacgatgcctaccaaatggttgatatggctgtgcacgccgccgtcgctcaccaggccgagcaggtgcaggcgggagccggcggcctgggaaaaagcggtcttcagcacggaattttcacccatggagccgtccttgatggcgttgtccacccggcaaagatcctggaaaaccacgcggccagcgcccaggttcaggtgccccacttcggagttgcccatctgcccgtccggaaggcccacgtcctccccggaagcgcccagcaggctgtggggatagttggccaggaggtaatcagtaaagggggtatcagccagaacagtggcgtcaccgtactctttcgcgacatcaggccccaacggattgcggccccagccgtcgcgaatgacaagaacgacaggctttttagaagacatgggccttatttacaggcatcccctccttttgaaaagcctgaaatcaggcattccttctccgactctgaaatagcctgcggtttcccccccttccccacgcggacaactacataccttccactcatgaccggatgctccgaatggaacaccgcaaacttccattccagcgaactggttcccaccgctcccaggctcaattcaatgctcaaccagtcgcccagaccggcggaactggcgtaatccacctccacatgcacgcggggccagccgcaatcgggggaaagaacctccagcccctgggaacgcaggtactcgtgctccacctcctctaccaggcacagcagccgggtgaaatgagccacgccggaggcgtccgtatcgtgaaaggctacctggcgtgttctgacaaaggggatgcagggaagttcttcaggcatgccttcatcctgcctcctttcccggaagcatgtccagccgcaaatgcgtgacaatatgtcacatcagcttgatttgtgacatccctctctttatatataggggcgagcccggacggaaacgccgccatgaagaaagacaccatcgataagctgatcggccgcattgaccatatcaaggaagaggacctccagcgtttctttgtaaagctggcggaacagcagggttttttccagcaggtgtttgaagccatccaggaaggcctgatcctgctggacagcaagggaaaaatcctgtttgtcaaccaggccgccctcaagctccttgacaaggaacgcggccagatcacgccggaagacttctgcatcttcctgggcagggactgcacctgggacaccatccagcagagccggaccgccgtttcccgggacgtggagattttttatccggagcacaaattcctgaacattttcatctcccccatcggcggcaggagccagggccatctgatcctgatacgggatgaaacgccccggcagaagaaaaacgcggagaacatcgaggcggaacgcctgaacgccctcacgctgctggccgcgggggtggcccatgaaataggcaaccccctcaactccatcggccttcatctccagctcctggcccggaaggcaaaacaactgcccgcggagtaccggacggacatggaagaactgctgaaaacggcagagagcgaaaccacgcggctggacgtcattctgaaacaattcctccaggccatccgccccaccaagcccatccgggaaccccacaacattgaaaccatcatcatggaggtcctgaaactgctggagccggaaatccgccagcgcggcatccagatcaacacggacctccagcccagcctccccatcctcagcctggaccccgtccagatcaagcaggtcttctacaacctgatcaaaaacgcctaccagtccatcccgccggagggaggcaccattctggttaaaagcggttatacggatgacagcgtgttcgtcaccgtggcggataccggctgcggcatttccccggaagtcatgggcagcatttacgaacctttcctgaccaccaaatccaccggctccggcctgggcctgctcatcgtgcgccgcatcgtgaaggaacacggcggctccatcaccctggccagccagccggggcagggaaccaccatcacggtcttcctgccgcgcgtggaacgcaccatcaggctcctgccctcctccatcccgtcatgaagatgcccgttctgctgatcgtagatgatgaaaaacccacgcgcgacgccctgcgcatgggctttcaggacgattacgaagtgtacactgccgccaatctttcccaggccgtcactctcctgcgggaggaatccccggacctggtcctgacggacctgcggctgggcggggaaagcggcatggacgtgctgaaagccgcggcttctctgccccatcccccccagagcatcatgatgaccgcctacggatccgtggacgccgccgtggaagccatgaaacagggcgcgtacgacttcgtcacaaagcccctgaacctggatgccgtggagctggtgctcaaaagggcgctccatacccggaacctggagacggccaaccaggagctcaccacccgcatccaggcggactccggcctgcaaaaactgctcggacggtccgccgccatggaacacgtgttctccatcatccgccaggtggcgcccagcaagacgacggtgctgattgaaggggaaagcggaaccgggaaggaactggtggcccaggccatccattccctttccggcaggccggagaataaattcgtggccgtcaactgcgcggccctttccccccagttattggaaagcgagctgttcggccatgaaaaaggctccttcaccggagccgggcagcgccgcatcggccgctttgaacaggcggacggcggcaccatcttcctggatgaaatcggggaaatagacgccggaacgcaggtccgcctgctgagggtgctgtccgaacggaccattgaacgcgtaggctccaacacgcccattccggtgaatgtgcgcattattgccgccaccaacaaatcactgaagaaactcgtccaggagggcaaattccgggaagacctctatttccgcctcaacgtggtccacatccagatgccccccctccgggaccggcgagaggacgtgcccctgctcgccaccgccttcctgaaagaattcgccagggagaacaacaaggaattcaaacccctttcccgggacgcccttgacgccgtacggaactactcctggcccggaaacgtgcgggagctgcgcacagccatggagcacggcgtcgtcatgagcaactccgccagcatagaactctcccatctcccaccccggctgcacgcgccgcagcagccggccgccccggggagcatggcgcaggaacaattggaggacaatgcccccagcacacagaatgggcttgtcccggcaggggttttgaatttatccttgctggagcggaatgccatccaacaagcgctggcccggtcaaacggcaacagaacggcggcagcccaccttctgggcatcagccgccgcacccttcaacgcaaattacaagatattcaaccttcatgaatgcgcccaccacggcatcccgcacaccgtttatcatcatcctcatcctgctgctggcgattacgggtgtgcagtactttttcaattttaacggcctgaacgccagcgccgccatggaccaggcccaaatcgcccggaacgtggccaggggacagggaatggccaccaactggctgagacccatccagatggtctccgggagcacccgcgccggcctcaacccctttctttccgacgcccagatccgcgaacaggaaaccattctggcgggacagggggaatccctcgtcaatccggaaaaattcaatccctacgccctccgggacacacgcaacgcccctctgaacatcctggtggaagccgccgtcttcaaggtggccggcgtccacaagtttgacctgtggagcatgacgggcagctccatgatctacctgccggaccgcatcgtggcgggcatttcctgcatgttcttcatcctggctgtcctgagctgctattacatcctccaccaaatgtttgatgtcaccatcgccagcttcacctgcctgacgatgattctcagcaacctcttcctgcaatacgccaccagcggcctcccgcagatgatgatgctcttcttctttgcctggggcatccatttcctgtccacggccctgcaaaacagggaggagaagcgtaaattcctgatgccgctcatttacagctccatctgtttttcatgcgtctgcctcaccggctggatcggcctgtggcccatggccggctttctgattttcgtgggcatccgcttcaagcctcacggcctgtactgcattccgggacttgtgatcctgttcctcctcctggcctaccccgtttacatcaaccgctccctcagcggaggcttcttcggaacggcctattacaccatcttcacggggctgaccggcaatgaagaaatcgcgatgaactccctggccgccggggacattcccatcgccgcccagaaagccgtcacctccatcgtcaacaacatcctgacgcagggcgacctcctttacgaaaacctcgggaaccttcccctggccatggtgttcctgctggccctcctgcacaaattcagaaggccggaagtcaaccaggccaaatggggcgtcttcgccatgtgggtgcccgccgtcatcggcatggccctttacacctccaacaaatccggtatttccctgggacagattcaaatcctcttcgcccccttcttcacggcctacggcacggccttcgtcctcaacctgatcgcacggcactccaacaaggaggtagtccccatcctgcggggcggcgtcctgctgctcgccctgctcatcacttccctcccccttctgctcagccttccccagatggtgcgggtgggcatcctgacggccagccgcggcattcctgcatggcccccttatttccccccgggcctcaaccgggaccttcgcgcccagacgtcggaaaaggatttcatcctcacggaccagccgtccgccgtcggctggtacgcagacaggaaagccatcggactccccaaaatggtggagcaattcatggtgctggaacgcattctgaaattccacggcggcaaggtgggcagcatcctggtgactccctcatccacgctcaacgcggacctccgcaccattgccgcctcctacggggaattcacccccctcgttctggaaggcaccgtcctgcttcagacgaaggacaggaatcccgtatacctctttgaccacagccgtgcgctctaccccttgtcgcaacgctttgggacgccggactcccgccaattcatccagggagcggacatgattctttacaaagaccttcaggaaaccgcttccacccctcaaccttaattccccatatggccaaacaacggaaaaacgctcccggatttgaagaatccgtagcccgcctggaagaaatcatacgcttgacggaagcccccgtcaccgaactggaagacatgatagccctggtggaagaaggcaacaagctcatccgccactgccgcggcatccttcatgatgcggaactgcgcatccaaaccctcagcaacccggagaccgtccaggatggaacggatcccgatgaaccagacagcaatgaattctcccttacctgaacttccggagctgctggcaagcatccgcagccatgcagacctgatgaaaatccctgagtcggaactgccctggctcgcggaagaaatccggaacaccctcatccactccctttccctcaccggcggccatctgggccccaacctgggcgtggtggaactgagcattgcccttcaccgcgtctttgaaacaccgcgggacaaaatcatctttgacgtttcccaccaggcctacgtccataaaatgctcacggggcgcgccccgctgattcacaccatccgccagcatgaagggctctccggctttgccaaaatgtcggaatccccccatgacgcctacggtgcaggccacgcgggcacggcgctttccgccgccctgggcatgtgcgcggccagggatctgaaaggggaggactaccatgtagtggccgtggccggggatgcggcattcacctgcggcaccaccctggaggcgctgaacaacatcagccagaccaccaagcgctacatcaccattctgaacgacaatgaatgggccattgataaaaacgtgggcgcgctggcaaaatacttcaactccctgcaaacctcggaaaccttctcctggctgagggacaagacggcctccttcattgaaaagctggggggaacgcaggctagggacttcgccttcaagctggaaggcaccaccaagaacctcatcttcccctccctgctcttcaataaattcggcctgcgctacttcggccccttggacgggcacgacatccccaccctcatccgcaccctttcctacatcaaggacctcaacgaacccgttatcctgcacgtggtcacccagaagggaaaaggctaccagcccgcactggacaaccccaccaaattccacggcctgggctcctactgcgtgcgggacggcgaaacgcaggcaaccgccacccccaccttctcccacatcttcggttccacgctggtggaaatggcgcacgaggacgaatccgtcacggccatcacggccgccatggccagcggcaccaagctggacctgttcaaggaagccttcccaaaacgctactttgacgtaggcattgcggaagaacacggagccctctttgcgtgcgggctggcggcggaaggcatgaagccctacatcgccatttactccaccttcatgcagcgctgcattgacatgatccagcatgacgccgcgctccaaaagctgcccgtgcgcttctgcatggaccgcgccgggctctccccggacgacggccccacgcatcacggcctgtttgacatcgccatgatccgcagcatcccgaacatcgtcttcatgcaacccaaggatgaagcggaattcgtccacatgctccggaccatgaaccattaccagaacggccccaccgtcatccgctatccccggggttgcggcgccggggtcccccttccctccacgccggaaattctccccatcggcaaggcggaagtgctccagacggggaaggacgtgactctcgtttccctgggcaccatgatcggcatcgcccgggagacggcagcgctgctggaagcgcagggccacacggtcaccctcatcaacgcccgcttcatcaagcctttggatgacgaatgcatccgccggcatgcggcctccagccgggtggtctgcacctttgaagaccattccatcagcggcggcttcaactccgccgtgcttgaatccctggaagccggaggcgtcaccacgcccgtggaagccatcgcatggccggaccagttcatcgaacacggttcggaacccatcctcagaaaaaaatatggactcacggcggaagccgcgctacaaaaaatcattccccacctgaattcctgacccatccatgaaagcatgcaccttcctactggcagccctgacgcttgcccttctccccgcctccgcgcagcaaacaccgccggaacctccgtccccggcgtggattcaggaattcaacagcctgccggaagcaaccagaaaaagctacattgaccaattccgcaaggcggaacagctctttgcgcagaagagaaccatggaatgcctcttctccctgacggagctggaaaagctttatgcaggaaacccgggcttatacaatctccgcggcgcatgctacattgaaatccgcaacattgaaaaggccctggaaaactttgaaaaggcccagaagctggatccctccaacctcaccattcagttcaacctggcggaagcgcactacgtcaatcatgactatgccagggcgctgaaagccttcacggagcttctgcctcccttcaaagacaatcccggcatgactcccctgctgcaattcaagcgctatatctgcgcccgcaagctggacaaccggcccctggccaaggaactggaaaacctgtacggcccgatggacgacacgccgtactactactgcacccaggccatcgtcaaattcatgggaggagacaaggacgccgcccaggaacagctcctttccgccatccgcatccacggaggcaccagcgccatccaggcctttacggacgccatgacggaagccggcatcctgccctccccctacgggcagaccgtcccaacggaacaaccggctaaaacagggctggaaaaacgccgctgatgaatgcggaagcgacggtcctgaagctctatcccctgggagagaacggcctgattgtcgtctggtgcacggaggaaggcatcatcagaacggcggccaaaagcgccagaaagcccaacagcccctttgccgggcgcctggacctcttctaccagtgccgcatgcagtggacgcaggcaaaaacgggagacctgcactccctgacttccgcggacctgctctccccccgcctgcccctccggaaaagctacctccggctcagcgcggcaggctacttcgcgcgcctgtttctccaaatgctggagccggacacgcccatcccggaattctacgacctcctgcaacgggcatacgcctatctggaaaacaacgacccctccctccgcgccgtcctgcactttgaacaggaactcgcgcggctgcacggcatcgcgcatcccggcattccggcgcacgtcattctgaaatcccacttcggcaagcttcccccacagcgggaaaaactgctcggcagcctggaacaaaaagaaaactgaacaacatgccgcatcctttttcaccagccgcacggactttcatcctcccatccaactcctccttccctccggggaaggatacggattgttccgtgcgcgtgattgacttgtccgcggccttcgggcaaaatctccggcacggttttactgcatgaagatctttgacagatacattgcccgccagctgctgggtgttacggccctgggggtgatggccctgagcgccctgctgctcctgggcaacctgttcaaggaactgcgcccccttctggtggaaaacaaggcgcccatcagcatcgttctggaattcatcttccaggtaatacccttctcgctgatgttctccattccatggggattcctgacggccgtgctgctggtatacggacgcctggcctcggacaacgaactcacctccatgcgcatgtccggcatgagcctgtggcgtctgagcgcccccgccatcgccatcggcatcgccctctccggcctctgctactggatcaacatagacatcgcgccccgcgccaagcaatccatttccgaactgctcatcaaggccgcctccatcaacccgaaggggcttctcaatgaaggacaggccatcaccaaattcgataatctggaaatctacattgacaagcgcgtggacgacgtcatccacggcatgcacatctatcagaaggcggacgacaaatcccccgccgtggccatgcactcggaacgcgtgaccatggacttctctcccgagaaaaaaaccctttacctgcacctcatcaatccgctcatcaccacgcaggaaaaggactccatctcccaaagcgtgaccatggatgaaatgcccctgagcatcaacctggacaaatcccgctcccggcgcatcaaggccaaccgcttcaccaaccgggaaatcagggaagccctgaacacgcccggctatctggataaaaaacagaccacggaattcgccacggaactgcccaggcgcgcctccttctccctggcctgcatcgtctttgccctcattggcgtgcccctggccatcaacacccgcagaaaagacacctccacgggatttgccctgggcatcctgatcgcctccctctactttgtggccctgatctttgcggacctgtcccggaaaagcgacacgatgctcccctacatcctgctatggcttcccaacgtcatcacgatcgccgtggcgctgtaccttcacaatcaggccaggcacaagggataagcccccggcggaagcgcccgccgttggcgcggaattagctttcacagctccggcccttcgggtaacatggcgcgcatgcagcacgtccccaccatcgccatcgtaggcaggcccaatgtcgggaaatccgccatcttcaacagaatggccggaaggcgcatcgccatcgtgcatgatgaacccggcgtcactcgcgaccggctctccgccccctgcaagattacggaccgcgcctgtaaaatcatggacacgggcggcatcggcgcgcgcctgaccgacggctttgcggaacaggtggcggcagaggcggacatagccatgaaaacggcggacctcatcctcttcgtgctggactgccgggaccacctcactcccattgaccagagcattgcggaccacctccgcaagtcggacgttcccgtcatcctcctgctcaacaaggcggaccatgaaaagcaggatctgaacctgggagaattcgccggactgggctttgacgaccatatctttctctccgccgcccacggcaggggcttctccgaactcgcctcccggctggacgatttcctcaaacaggagggcgccccgctgaaagaagaactggaggaagaaccggaagaaggggaggtcgccgccccccccatcaaggtggccgtcgttggacgccccaacgcgggcaaatcctccctggtcaacgccatcctccaggacaagcgcaccatcgtttccgacgtggcgggcaccacccgcgacgccattgacgtcccctacctgcacgacggccagccctacgtgctgatcgacaccgccggcatgcgcccgcgctcccggcgggacacctccgtggaagtcttctccgccatgcgcagtgaaaaagccatccgccgggcggacatctgcctgctggtcattgacattgcggcaggcatcacgcagcaggaccgccgtatcgccggcatcattgcggaggaagggaaaccctgcatcatcatcgtgaacaaattcgacctcttccacccgaatgccccgcgcaaggaccgcatggcggaagtggaggaacaggtgcgcagggaactcttcttcatcaactatgcgcccttcatcgccacctccgcaaaaaaagcggagggcgtggaaatcatcttcaaggtcatcacgcgcatccgccgggaatcccgtaacctgcccaccaccggacagctcaaccgcctcatccagcttgcccagcagatgaaccctcccggcaccgccagcggctccaccagaagactgaaaatctactacgtcaccacggcggtggaccccaagtacaacaccattcccgtcccgcgctacgtcctcttcgtcaatgacaagaacctgctcacggacagctactcccagtacctgcgcaacaaaatcagggaagcctaccccgctcccggcatcccggtcatcttctccgcccgctcgcgcgtgcgcaatgactgacaatcccgccttctccgcatgctctccgtcaggaacctcagcgcctccttccacaccagggccggcatcgtccgggcggtgagaaacgtgtcctttgacgtggcgccgggggaaacgctcggcatcgtgggggaatccgggtccggaaaatccgtcacctgctactccatgatggggctcatcccgatgcctccgggccgcattgaaagcggttccgccatgctggacggcacggacctgcttcattgtccggaaaaggaactccgttccatccgcggcaagcgcatctccatgatcttccaggatcccatgacctccctcaatccgtacctgaccatcggggagcaggtggcggaacccctcgtcattcatgagggagccggcaaaaaagaggcgcgcgaccgcgcgctggaacagcttgccctggtaggcataccggacgctgaacagcgcatggacgcctatccccatcaattctccggcggcatgcgccagcgcgtcatgatcgccatggcccttatcaccaggccggaaatcctcattgcggacgagcccactactgcccttgacgtcaccgtgcagaagcaggtgcttgacctcatcagaaaacttcagcaggacatgggcacctccgtcatcctcatcacgcatgacctcggcgtggtgcgccaatatgcggaccgcatcaacgtcatgtacgcaggccgcattgttgaaagcgccccggcgcgggagcttttggaacatccccggcacgcctacaccagggccctgatgaaatccattcccggactacatgcgaaaggctcccccctctacaccattcccggactgcctcccaacatgatgcaggagccttgcggatgcagcttccgccccagaaataccctcgggaacccggaactctgcctgacggaccgggaaccggagctggtggaaatatctccggggcactcagtccagaactgtccgggatgcctggccgggaatcagtaaaaccttgggagaagaatagggcctatggggctcacaggaaactttagggattatagggaattcccatcatcacccctatcacccctatcacccctatcacccctatcacccctatcacccctatcacccctatcacccctatcacccctatcacccctatcacccctatcacccctatcacccctatcacccctatcacccctatcacccctatcacccctatcacccctatcacccctatcacccctatcacccctatcacccctatcacccctatcacccctatcccttctcatccggctcattctttccctcatccccccttctccaagaaacttcccctccaaaaacctgagctgccgcattaataaatacttggcctgaaaaatcaggcaaatggccatattggccaccacctccggcggccttgtccgggccagttccaaaaaataatcccgggccagacatttatcctcacccttctttctgacaaaaagggactctcgtgaatccttttcccacacgggaaagcctctcactctcaaaacgtattcataatcagccagtaattcatccagactggctctggctacattcatcagcttgatttccgtttccatggagaccagccccgcctcctttccctccgcaatattctgctttccggaacgggcagcctgaaccatctgatcaaccgtcctgtcgcgagaagacaagtacgccttacaaaaataataggtcagatcataaatctgctccgcctttctgtaggaaagcagagaccggtaatcgccggaagggcgcaacagggaagccatgcgtcccagcctaaaacccgcaacaaaaacaatcaatatttttataaaaattaccaacatggaccccgtccaccagcacatggttcgcctgaatggccacgggcatcatcagcctgccggaaacgtccgcctccatcttcccccaatggatgaggggaaggtactgcccccggaacaccctgtaggcgctggccacctgcgtaaacggaatccacggcaggcagctgaacacggcaatatccgtccgatggcagggattcgcccgggccggagcctgcttggctgcctgaatgagcggaacggcatgctccagaaaatcagccagctccgcccggtactctactaaaatctgggtgaattccccatccttagccagcaccggaaccagggcgtccacggattcatactcccacacctccccttcctccaccctctggcgcagttggggaatcttattcaccgccttcaacagcacaaacaggcacagggcgaaaaaggaaatcccctcctgtttcgcataatggtacaaggcatccacccgcacgggagacgtgatggaaaacatgggacattcaaacgtctggaaatactcgtaatgggaccttcgcggccaggaagcgatttctattttctttttcatgcacttattttctattccaggaaggctctccatagatgtttttgcgcttttgctccggcagcaaaagactgaacaggacgggagcagtcaagacagctatgcccgtaaatattccccctacaagatcccagcaaaaggacattgccagaaactttcccttaaaagaacaaatcaggactgctatccataccggccagatgatcgccaaccagcccccatccagcccggcatcatgaaaacgtctgacgcccagcgcaatgaagcaaaacaagaagaaaaacaacagaaacaaccccgacagaagagcaaaaagcatcccaaaaggaagaggttcaaaaacatcgcaggctccacaaaaacaaactatccagacgagaggagcagacgccagaagtgcgccgtaggtaacagccgcctcccggcgcgaggaacgggactgcatcaccagcagggaaaaaaaccacttaaaacgacttcttctgccgcatttccatattttgcccactttcatccattccccggttccggaataccgctccttgagcaacttccattccggcggagttcccggaatgtctcctatccatatccagtcttccgaacgctcctccctgaccatcagtcccagcggtaatccggcatagcggacttccctgaccaggaaatcaaaatcggacggcccatgcaattccccatccggcgtatggtaataataacgtttcacaatcactcctttccttccgttctttccccggttcgcccggaaatgccggaccggctgttggcgggaacacatcccagcgcaagcggcgccagggaacaaaacagaaacatgcagaaaaacatggcgccgcaaattaaaagggaggcattccctcccgccgcagcccgcgcccatccgtacacatgataaaagcccgtctccgcacatcccaaggaagccgcgtaaacgggaaccgcccagaggaggcccagatcaagatcacggagcctgcgaaaaacaagtcccaggcatggaacaagcatggccgcactcaaacacgccaggtttattccatgctcagccgttaccataaaacgcggatgaatactcccattcaccgcggcccaatatcctgaaaaaaccagcgtccccatgcacacgccataaaacagccacgcatataaatatgaggcgctggaaatgcggccggaccaagaaaacaaccacctccatcttgccgccatccattcaggcaagctgaacttcctttcagaaaaaggaccaggactggaagaagacagattcacgggaaagccctttcagtcaaacacgcattacggggtttgtcgatattatcctccctttccggcgaaaggaaaaatccccggttcttctctgtccgggaaacggaacggtcatacctccgggggatgaccgtattgattttccttcttcgtaccgggaaacaggcccagcagcgcaacaacccaggttccggacaacacgaaaacggccactcccattcctcctgccgccattactccggcctttcctgcatgtgccatgaacattccccacgcatcagactggaacaaacgaccaaacaaccattctaccggcaaactgccagccagaaggacaaaaggaagaacaaacgaccaaccgcccgccagggacaagtcatgaagccttctccaacacaaggcaaagaattgaaggacaattagcaaccccagcaacaatctcaagagcaggaagatgaagaacaaacaggaaaacacgtcgattcccggcatcaggggaggaagagcaagccccagcagaatctgggcaaccgccagccccaggcaatccgccagcgtcatggacaggaaaacggacaggcattcccgccgggaagcgcgtccggaaaagacgaatgccattctccatgatctccgataataataccggagacgcttccaaaacgacagaccggctacctcttccggcggaacagacatcacgttcggataaaatccggttcccgtttcccttttcactgcctccgccagggcaacccattcttcaccatccactggacgaatcatcaaatgatcaggcagaccgccccattttacctcacaggccagaaaatccagttcagcaggaccatgcaattctccattccgatcatggtaaaaatatttcattctaaagtatacagctgatcctatttgcttaattttcagcaatcaatacttttttcgacaaatataatccagaaggccccctacccctcccggacggaaagcaagtccgtcacagacgcgcgcttcatgcgccacgcaggcagaaggcacgccagggaggaaagggccagcaccagaagcaccgcataccccagatgggtccagggcatcgtgacgggaggagtgacgatgccgaagtgatagccgtattccagaatctggatggagcaccaggctcccagcacgcccagggccaggctcatgacgacggcgcacagggagaccatcagcgtctccgcccagagcatccgcatcaccatggcggccggcactcctaccgcccgcatcaggccgaattcccggcggcgggactgcacggaggccagaacagtattgagcacggccagcacggcaatcaccatcatgatgatgggaagcttgctcatcgtaaagatcacgtcgtcaccgcggctggtgacgctcccccccaggctttcccgggtcagggccttcaccagcggcttcacgccttccccttcgttctcctgctgccgcaccttcatcagggcgtattcccccaggtcgttctggagctccaggttgcttaccccgggggcggtgtccccccagatgaactggaacccctgatggccgtattcctccttgagccagcgttcatcggcaatcgccagggccgccacaaagccgccgcgacgcacgcgcatgccgctggtcttggtcagccagtgccagccggggaaggagacgactcccgccaccttccagggttccccctgcatgccggggcctctgccccgtccgtgagctccggcagacggagcattcccggaacggcgcccctgatgggacggattcaccagcatcaggtcatccccggccttcagccccaccgtccgggcaaaggtgtccggaatcagcagggaacgggtggattccagcatggcataggcttcctgcgggttgccggaaacgaacacgggcctgaacaggggatggcttccctgagccatctccgccacgggaatgccggccagcacgatggagcggttgcgcattccggaaaaacctggggtcttcatctgcgccggggcaatgtccggttcatccacgtaaatgggatacatccgcgaattacgcaggctgggccgcgccatcagctccggaacgtccgcaggcttgaactccgtatgcaggaaggaaaccagcgttccgggcgtggacgtatccggagagaaaggaaccagcatggaatatccccacgtctgcacccctacaaagagggacaggcccacggacatggatacggcggttcccacggaacggctgaggttgcggctgagctgcactttcaggaaagaatgcggcacgcgcagcagcagccccgtgatccatgatccggcccactccgtcacgcgcacgaaggcgggagccaggaacagcgcaccggccaccaggccgggataccccagccagaaaaagatccacttgcgcgtctccacctccaggcccggcagaagcagggccgcaggctggaggcacacgcacgccagcccggcgatcacggaccacacgggaacgcggctcactttcccgatgaatccggaagagggcacggccgcttccagcggagactggcgggaagcgcgccatgcgggaatgatggaagccagcaaggccccccccacggcgcacgcggcggcagccagcaccgtcgtccaggtcaggacggggaccgaggaagaaccttcctccagaaggtacaccaggcaaaagccggcggccaggccgcccagcagcgccggaatgcacaggaaaagcccctctcccacaatcagcagcgcgatctgcatgcggctcatccccagcgcacgcatcagggccagtctgcgggtgcgctcgctgacgccgatgctcagggtcgtgaaaatgatgaagacgcaggagaacaggacgagccagacagacatctccgcactctccttctgggagcgcacggaacggtcgctggaaagccgctggataatggaatccgtatccgccaccacggcggaggcctgggccagctcctgccggaggccgtccacaaactcctttttgtccaccccttccttgagctgaacgtaaatcaaattgggggcaaaaggctggcccgtgattttttcacacacctttacgggcacaaagagggaggaaaaagccggtccggacatgccgcccggtcccataatgacgccgggggtagccttggcctgcttgacgatgcccacgaccttcacgtcgtacacgtgcgttcccacgcgcacgttcatgacggttcccacgcccgcgctgaaatacttggcgcttccgctgcccagcaccccctccatggcggaggaggaagccatatccggccagacgccttccttcaaatcataaggacattccacggcatggttccccaccaggatggggctctgcggaggaatccccatgcggtcgcgcgtctgctcgtcaaagctgccgcgttcattcccgcagccgatctggaggcggggcacctggcaggcggcgttcacggattccaccagaggggaggcagccaggcgagcggccagatccggatcactgaaccgcgggtactgcccggggggaagcggccctttgggcgcctccggcaccaggcaaaggtcatagctgcccatgtaggcctccgcgtcgttatcgaactccttgaccagcgtatcatagctccccatcatccagacgatgaggctgacggagacgaggatggcgaacacgctgaccgccacccggccggggttggcgcgcaggtcccgccaaatcagtttgaacagcagcgtcataaggcgtcattcagcgtgcgttcatagaaggaggacaattctacaggtccggcaaattccgccgtgggcctgtcgtccacgatgcggccgtccttgagcacaatcacgcggtccgcccacatggctacgtccggcgcatgcgtcaccagcacgaaggcgcagccctgcgtacggtgcaaatcccggaacaggtcccccatgagccgggtgttttcagaatccagattgcccgtgggttcatccgccagcaccagcgccgggccggaaaccagcgcacgggcaatcgccacccgctgctgttccccgccgctgagcgtatccggcatggcgtgccggcggtgggacagccccactttttcaatcatggtgtccagagtggaagaggccacttttttgccccccgccagggagggcagcaggatgttttcctccacgttcagggttcccaccaggttgaacatctggaagatgaaccccacgcggtcgcgccggtacactgtcagggcggcatcagacatggagccgaggtccagcccatccaccgtcaccgtgccggaatccggaggcagcagcccccccagcacgttcagcagggtgctttttccggagccgctcgcgcccatgacggcgacgaactctccctggttcacggtaaggctgatgtctttcagcacggctatgtcctcggaaccggacttgaagctgcgcttgaggcgggtgacggaaatgacgggggaactcatggctggaaggaatggttagaaggcagtcttcacgcctacttcaaacgtgcggggctctcccaccgtgcactgcacggcgtggcgggtggactgcacgtacttcttgtcgaaaatgttgtatacggccagcctcagggtggcatccttcagccatttggtttccggcagggggatttccaccgtgaagtcaaacacgctgtaggaaggtatggtataattatccgcaatctttgcaccgcggaacgtggcgtagtaggaatccttgcaacggtagcccaggcccagcaccgtgccgttcagcaggccgccgtcaatgcggtatttctgccagagggccagcgcattcggagcgatggtgggatacacttccccggaggtccggttcttggtgcgggtgtaggtgtaggaaaggtaggaactccagttcttggtgatttccccgttcagggaaagttccacgccttccgccctcttggagccgtccgaatagtaccggttggtatatccgtctatggctacgggagtgttattctggatgatgtcaaaccaggaagcggagaaccacaccttgtccaccgggctgacccggaagccgaattccatctggtccgtacgccaggaatcggtcagttccttcccgttttcatccagatacccgaaattgggggcggaagtacgggccgcattggcgaacagagctacgcgctcaccgaacatgcgggtaattccgaaacgggggctccacgcaaacgcgtaattattgtccaggctgaaatgcgcgtccccgcgcacgccggccaggaaacgccactgtccgtagctaaggacatcctgcagcaggacgcccgcccgctgaaccacggtatccgtcgcattggctccggaatagtcgcgcccggcggggaaaaagggcggaggattgtacagggagaaatagccgttcgtgttcgcggtagcgttcgtcaccaggctggaaccgtcgccataggtgctgctccccgtgtaggaaacgcccatcagggcttcatgctccacctgtccggtcttgaactccgccagcgcgttggaatagaaattccagttgatgttccactcgtcgctccacgcggcttcgtatttggcctttccggaagcaatcatctggttgtaataatcctccgtgctcattccgcgtccggcggaagaagaaatgccccagacattgtagtccacatcgctgtaccccatgccgccgccgatgcggattgtccagaccttctccagcttgcgctcgaaatccagcatcgccagcagggatttggcattgagccttccgctcggagaaccgtaccaggcgtcatacggccccacaaagtggccgcccagcacggggatgcccatcgtcgtcggcgaattctggtactggaaactggtcgtcagcaccgtcttggtacgggaatcatgctgccagcggaaaatgggggaaaccgtgtacttctggccaccgttggctccgttgctcagccagaacgggcgttcatactcggcggctaccaccgtgcgcagggcaaaaccgtccgtttcattacccctgtaccgggtgtcgtcaatagttacgcggtacttctgcccatgatgggaaagacgggcgtaagccgtcaactccgttcgttcctcaaaatcaggcgccttcaggatcaggttaatggaaccgccggcgccgtatgccccgagcgtactggtctggccgccggaaatggacccgatggggcctttgacaatttcaatattttctatcagggacgtatccatgccgtatcccatgccgcggggaagaggcatgttgcctatctgcacatcggtgccggcaaaaccgcggatggtgtactggtccgccgtgcgggacagcagcatgtctccccccgtattgacggaggaatccatgcgcagggcctccaccagggaatcggaacccttggaatccatcagatcccgcgtaataacgtttaccgtttgcggaacttcttccgtcttcatgttcgtgagggtggcggaactgaccgtctccgcccgcagggacttggaacggatggtcatcacgcgttccggcatttcctgcacgccctcctctgcggcggcgggtttagtctcggcataggcggactgcccgaggacaagcaggctcccaatggcggcggcacggtgcaaaccgcgcccctggcggcggcggcgaggggtattcatgttggataaacgcatggggcaagtataaaacggaacatcgggccgtccatcccggattgttaacaatttgataacaggctgttcctttcccttcctgcaaaggcacatccggcagcagaacgcccccggcgcctctcacaggccaagagcctgcgcccggctctccgccgcggccttcagccatttccgcagcgcctccttgtctccggaggccagccggttccgcacctcccccaactgggacagggcttcgtccagccggtccaggacggcgggggcattctccgtcaggatttccgcccacatggacggttcccccatggaaacgcgggtggtatcgcgaaaaccgccggcggacaccagccccagcagcttcacatcccccccgtccagggcggtgtggacgcacagggcggacaaggcatgcggtatatgggaaatgcgggctacggaagaatcatggtccgccgctttcatgcggatgcagtggcagcccacgcgctcccagaaccgctggagcagcagcagcatgtcttcatgcacgtgctcgtcattggtcagaatgcacgtggcgtcccggaaaagttccccggaggcatgctccatgccctgcttttcagaaccggccatgggatgggagccgataaacgccacgccggtttccgtcagagcggagcccacggactggtggacgcagcccttcacggaacccacgtccgtcaccagcacgcccggtttcagcagggggagcattccggaaacgaggcgggacatcacgcccaccggggtagccagcacgaccaggtccgcgccttccaccacctcttccaaccgggtggaggcggcatgggcggctccggaagagcgggcatattccagcggctcctccctcctgccccacaggcgcacgtggacatgcggcagctgcttcctgacggcaagcgccagggaaccgcccagaaggccggggccgagaatggctacggaggaaaaggaaagctgttttctggaagcttcgctcatggtttcacagggggtagaatacaccagcgccccggaacatacagcatgttcaggggcgcgggcatcatcttttcgcggcggccgcatcagggcacgcggaacttcttgatctcgttcgggaagttggtgtcccgcagcacggtaccggaagggtagggcttgttggtgccccggttcagaatcttgatcttcttggtgcggtcatacgggctgaccaccaccgtggggtccgccgtgggccacgccacgggaatggaggaggcagtggagggctccacgggcctgggagcggcaatgccggaattggcagagtcactcacgggattgggaacgacaggcttgggcgcaacgggcggcggaggcgtgatattgttggtgcctcccaccatgttgccgatggtgccggaattggtctgggccggatccggattgaagccggaattctgacccgctaccggatccagagaattttcacgctgaatctcattcaacaggctgctgccctgggcgcccatggcgccggagccggacggatagacattttccgtaggataaatgccgatggggcgttcattcacgcgttccgtttcacaggaaggcagaaggattgcgcctgcggccagcagcacgcctatcgtctgggaagtattcatatgatctctcttcgggtgatagctttctgccagcatcctacggccccctaccttcatgtcaaccataaagcctgtttgccgaaccgcttcatgacaaggattctccggcttccggcccctcatccgtgcaaagccgtacggggctgcggcgctccacgggggttttcaggcccggtggcgcgtcctccgcttcactgcgggaatacacgctttcacctccgtccggccatggccgttccaccgtccccgcatccttttcctttccaaaaatcgggaaaaagcctcctgcacgccttccccggagcgctccggtacggaaacagattatccttccctaccccctgtgatctgctacaatccgccccacatggatgacgtacagacatctaagaaaaaaatgccctcaaaaaaggaatggaggggcttttattccctgattctcattcaagcccagaacgccttcaatgaaaaagccgcccagttcctgctgattcccctgggcgtctggctggccgccaacagcgccgtgtacgggccggactcctgggtcaactccctccagtacatccttgcctgcatcttcgtactgccctacatcctgttctcccccttcgtcggctggctggcggactgcttctgcaaggcccgcatcatccagttcatgtctttcctccagatcctggtgctgggggccatgttcctgtgctacaagtatgagaacattgaaatggccgtcttctggttctgcgtcttctccgtccaggcgaccatcctgagcccggcgaaaaagggggtggtgaaggacatggtgggctcccgccagcttggctacgcctccgggctgatggaaatgagcctcatcctgtccatgctggcggcgcagatcggcatcttcgtctggttcgacatcctgcaagtttcctccaacgacggctgggaagccgccgccttccccacgctcatcctcacctgcatcgccgttcccgtagccattgcggccctgtcccttccccggtacccggccaaccagacccggaaattcgagtggaagctcttttacgagcacttcgtgcagctcaagtacctgtggagtcagcgggacctgaggctcagcgaaatcggcgtctcctacttctggttcctggccggggccctgatgctcatctccctccagatcgcccaggagcaccccattgacggcaccggattcagcatgtccgcggccattctcatggcgtggctcagcggcggcacggtggtgggcggcgtcatagcctccatcatttgccgtaaaaaaattgaactgggcctcatccccctgggcgcgatcggcttcactatcggctgcatcttcctgtccttcttcgctcctggctcgctgcccagcaacatcggcttcggtatcacgggagccttcgccgccgcgtacctggtgccgctgaacgctcacctccaggacaactgcgatccctccaaccgcagcacggtcatcgccgcgggcaacctgatggactgcctgatgggcctggtggccgtcggcttccagctcatgctcaggaacatcttctccatccagaaccaattctgggtgctggccgccctgggcgtggtcatcacgattgtggcgttccgtctcattccccgcgaattcatccgcatgatgggcctctggatcatgaggatcgtctaccgctcccgcatcatccaccaggaccgcattccggaggacggcggagccatcatcgtctccaaccacgtcacgtacggggacgcgctgttcctttccctcatctgtccgcggcccatccgcttcatcgtggcggaggaattcgtagccatccgctggctcggctggattctggaactcttcaactgcctccccatttcctcccggaatccccgggaatccctgtccaaggccattcaggccctcaaggccggagaagtgatctgcatcttcccggaaggccagctcacccgcacgggcaccctgtgcgccgcgcgcagggggctggaaatgctggcgaaaaaatcgcgctgccccatcgttcccatctacatggacgagctgtgggggagcatcttctcctactccggcaaccgtttcttctccaaggcccccctccatgtcccctaccgcttcacggccgccatcggagaacccattgcgcctgatgccgtcaacccccgcatcgtcatcaacaccctgcgggagctctcctccacctgcctggaaattgccgccagcatcggcagggacaccatcctgaaccacctggagcgcatcgcccacaagccgctcgttttagcaaaaaacgcgcggctcaccgggtatgaaatagccgaatgcctgatgaacgacaccgtggaggcggaccacccggaactcaggaagtggctggccaccctgctggacagctcccgctcccagagccgcctgtgcgacttctggatgaacgcccagcaattggagcgcgtgaactccctccagccccgggaactgctgctcaccagcgtggggcatgacgaagtgcatgaaacggtggcatctgtcctgtggcccatcctcaccagcacccccgtgtacctcatcagcgacggagaccacagcatgccggagggcatcaagcaggtgacgggctccgacttcctgcgccgaaggctgtacagcctggttccggaaacgcgcacgccgttttacgatttcagcggctccggagacctggtgcttcccaacatcgggtggcgcccctgcttcgccacggaccgcggcatcattctggccatgtccatgaaaaggagcgtcttcaagctggatgacggcaccgtgcagctcggcatgcgggccagaacgcgaggacgccttctcccgggcttttacctgaatccccccctctccaacgttatcgccggggctacgctccccaccccatattccctgccgcccaacctgtatctggacgagtcaggcttcctggcggaactccagtcttccaaccatgaacagtaactcatcatcccgcctccccattccgcagtatgtaatgacgctggcgcatgcggccgccctgcgctcggaagacccctaccgcaaggtgggagctgccgccctggatgcggacaaccgcgtgatcggcaccgcctacaacggcctgtaccccggcttcaaggcacaggacaccttctgggccagccgggacgaacgccagaaatacatgctgcatgcggaaatcaacctgtgcagcctgttccgcaggggggaggcgaaggtggtggcatgcaccacgatgccctgcacctcatgcatgcaggcgctgtgcgcccatggcgttaaaaccatttattactgcgagccgtatgacaagtccgaggctccggccattgccagcctttacggcgtggagctgatccaggtcacggattacccgctcagccagcactttcccctcgtcctggactgctgatctgcggaaactcaatcccggtgcacgcggcacgtccagccggccatggggcgcggaacgccgtcaatggagaaatcaatgtccggtccggtttccgtaacggttccggagacaatcacgcccgtgctcctttcagcatcgtcaaaggaaatattcacgtccgccatggcgcaggcggcgcggctgttggaagccggcacaatattcaaaaccccggaattcgcgccttcattgaaccggtacgtgtaaaccccatcatacacgattctcgtctccatcttgatgacgtccacatcccgtccgccgaactgaagcctgaacagcatgtcccctccctcaaagaggcttacctgctgaccactgagggaaacgctcccgtcatcccctgattttcccgaaccgccgccgcatccgcacaaaagcccgcacactgttacaggaaccaaacacaaaacagggaaaaatttcttcatgcccggaaaaatgcacaacctgacaatataagtcaagttcactcaattattattacatttttccaacattttttaacatcataaaaaaaccgcctgttttcacaggcggcctcaagaaaacacaggcggctgtcaacccacccagttccaggtgatgggaacttcaatatcgggatgcaggctgtgcttgacggggcagctcagggcggcctgttccagcagcttcctgtccggatgatcggctgggaggggcacggtgatgaccacttccagcttgccgatgcggcgcgggtcagcattcatgtgcttgcccacttccaccgtcatgccttccagcttaattcctttgcgttcggccacaatgcccatgatcgtgctcatgcagccggcgagcgccgcgcctaccaggtccgtgggggagaaggactcgccctttccattgttgtccacgggggcatccgtggaaagcttggccccggaaggctcatgaaccatggagcagtggaggccgccctcgtacgtcgttttagtttttaccatgaccctattttatacaaggcgccgcaccatgcaacacacaaacattgaatcccccctttctttatggtaaccgcctttgttatgagaaactttttgaaagccgccgccgtttccctgggtatttttgccgggggagcaggtacgggggcggcacaggacttcggagccatgaacttcggcggcgcgggagattttggaacgccccaggcatccggaacctccaaggctacagtcacgtcctacggagaaactcccttcgtcatcgtgacggagctgactctgccggaccactggcacgtctactacaagaatccgggaacggtagggctgcccatggaagccgcgttcaaagccgttcccggcttccgggtggaaggccccttctggcaaattccggaattggggaaaggactcgtggatttttacggttacagcgggaaggcgaaaatggccttccgcgtgactcctgagaaggacgcccccgcggaaacgaccttcaccaccaccatgacgtggcaaatgtgcgcggaacaatgcgccgcaccggagaccaaagacttcagcgtgacgctgaaacgcggagacggacaggccgcccccgacgcggccgaactgtccggcggcatggcgggactttccacccccgcatgggcgcagggactgaaggcccggatttcccaggaaggaaaaaccgtcaccctgcacctcaggacgaacgggcaaccggttccggaagattccgtttatttcttctgcgaccagggggaaatcaaccccaccactccccagaccttcaaaaaactgaatggctccaactacgagctggccatgcagtacaatgacaccacggacggcctttaccccaacaacctgccggaagcggacaaaggaaaaccgctggccagcctttccggcatcctgcgcgcagggaaggaaggcgtcagcatcacggcggacaaccgccccttttccgagggagcgcaggcggcggcaacagccgcggaagcctcccccgcgtcttccggacccgttcccgcgccgccgctgatgggactgggggaaatcatgttcttcatgttcatcggcggcatcatcctgaacgtcatgccgtgcgtcttcccggtaatcggcctcaagatcatgagcttcgtccagctgggagggggggaacggaaaaaagtgctggcccactccctgaccttcgtgctgggcatcctgatctccttctggatcattacggccatcctgattgcgctgaaagcgaacatgttcgactggggcgcccctgcgggacccggcattttcagcagtgaattctggctgggccacggcgcggaaggcgttgtgaactgggccttctggtttgaaaacccctgggtgaacttctgcctgctgggcctgatgctcgccatggggctgagcatgttcggtgtttttgaaataggcgtcaaggccaccaccatgggcaacgacctccagcaccagaagggctatgccggctccttctggtccggcgccctggctacggtcatttccactccgtgcagcgcgccgttcctggggcaggccatcggcgcggccatgctccagcctccgctgggcatcgtgctctgcctgaccatgatgggcctcgggatgtccctgccctacatcattctgggagccttccccgttctgaccaaataccttcccaaaccgggagcgtggatggaatccttcaagcagtccatgtccttcctgatgttcggcaccgccgcctacttcctgtggatttacattgcgttctttgacgcggacaaccatccgcaggacatcctgttcctgttcttcggcctggtgctgttctccatggccttctgggtgtacggcagatggtgccccatgtaccgcagccggaaatcccgcatcacggggggcgttttcttcgtgattttcctgctggccggcctgtactacatgctccccccggaaggagccgcctggttcggccgcggagcggattccggaacagcggattcctccgcagctacggctcccgcccgccaggcggaaggaagcgtgtggaccccctggagcccggaagccatgcaggccgccctgaaggagggaaagcccgtttacgtggacttcacggcccggtggtgctccacctgccaggtcaacaaggcgtcctacacggatgaagtgctggccgccttcaggaaatacggcattgtcatgatgaaggcggacaaaacccgcacgaaccccgccattgaccaggaactcaaaaacctgggacgcacggcggttcccgtgaacgccctgtacctgcccggcaaaaagccgatcgtcacccgggaactcctgtccccctcctacctgctggaattcctggaaacggaaatggaccgctgaaagcggccttttccgcagacggaaaccagtccggaccacaaaagcaacggcaaggcggacaagaaaccgggaaaactcagccttcccggttcagcaggggcatcagcgcctccgcccaggcctggtagcctttcgcggtcaggtgcaccttgtctctgaacattccttcccggaacgttccgtccgcattcaacaggcgtccgttaatggagagaatggtggtccggggcagtttcaaaccgcgcaggcgttcattgatctcctcctgccgcttgcggaggggtgcggaaggatcgggaccgtagggcgtcacctccatcaggatcagacgggtttccgggaacctcttcagcaggcgcacggccacttcccggatgccctttaccgtttcttccgcgggctgcttcccttcccaccgtccgatgttattcgtcccggccagcagaacgcagtaacgcggcggcgttttgactgccagctccgtatcctccatgcgccacaggatgctctccgtcctgtctccgctgacgccgaagttgaccgccttcatcggcaggaacaccttcttccaccattccgcgccttcctgctcccagccctgcgtgatggaatcccccacgaacaggatgccgcactccttccccagcaactgctcccggactaccttgtaacgggcgggaacccagtgctgcgtgttcatcctgggaacgtccgggggatccaggacaatccctgccgggggcttctccgcaaaaacggaagaaagggacaggagcagaaaagcggcaagaaaaacggaagctttcatcttccctgtaatacgcatggacggcaggccaatctttccgggggaaaaggaaaatcactttcccaacgccctgccaagcacctccaggggctgggaggacagcttcagctcccgcaccaggaaccggacgacgagcaggcttcccagcgcatcatacagggcgtcatgccaccggcggccgggaagcagagcatccacggagggggttagccccagggaatcacacaaagtggacagggaataatccggcaggcccggcacgcacatcttcccgagcgccagcgtatccagccacggcccgaagccgtgccccggaaagcggcgcaggaacttccgttccgtggcggggttatgtcccaccaccacggcgtcccccaggcgggaacggatagccggccacagggagggaaaggaaggcgcatccgccagcatctccgtagtaatgccgtgcacctgggaggccgaccataaaacgggtttgtccgtagaaatataggacgtccacagctccggctccccttccagggaaggacaggcggcaatgcctatctgaacgggctggtccgtctccccccgggccgccccggcggattcaaaatcaatggcggcgaagcgcaggccgccgatcatgtctgcgggcagagtcatatcagaacaactccagctgggcgtactctccggtgggcatatcgtcgtccatgtccgtattcttggccctgggttccgccagacgggcgcggtcctttttccggggccgcgtggaattcatttccagatgggacaggatggccttggcgcggtccacgatggcggcaggcatgcccgccaggcgggccacctggatgccgtaggacttgtccgccgccccctgcacgatcttgcgcaggaacacaatctcctccttccattcccgcacggccacattgtaattctgcacgccggccctggaacgggccaggtccgtcagttcatggtaatgtgtggcgaacagggtgcgggacttcaactcgtcatgcaggtattccgccacggcccacgcgatggaaaggccgtcaaaggtggcggtcccgcgcccgatttcatccagaataatcagggaacgctccgtggcgttgttcaggatcaaagacgtctcactcatctccaccatgaaggtggactgcccgcgcgccaggtcgtcgctggcccccacgcggcagaaaatgcggtccaccaggccgatgtgggcggactccgccggaacgtaagccccgatctgggccatcagcgtaatcagggccacctggcggatataggtgctcttgcccgccatgttgggcccggtcagcaggatgaggcggttttcctccggttccagaaaggcgtcattgggcacgaacacgtcgccggaaacattctgctcgataacgggatggcggccgttgacaatgcgcagggtcatggaattgtccagcacggggcggcagtactggtactgctgcgcgccctccgccagccccagcagcacgtccaggtccgccatggcgtccgccgtaatctggatgccgtcaatgtggcgccccacttcctcccgcagcagcaggaactgttcatactccacctggcgggaacgttcgtccgcccccaggatggtattctccatctgcttgagctccggggtgacgaagcgttccgcattcaccagcgtctgcttgcgctggtagtcgggaggcaccttgtcgtaatggctcttggttacttcaatgtagtagccgaaaacgttgttgaagcggattttcagggaatcaatgcccgtccgcctgcgctccttctcctggagctgggccagccactccttcccgtcgcgggaagccaggcgcaactcatccagcccggcgtggtacccttcccggatgatgccgccctccttgatcgtcacgggcggctcatccaccagggcgcgctggagcaggtccaccagctcgtcaaagcagcccatgcgggagcggatgctttccagcatttccccgcttccgggcagggattccagatcatccctgagcgcgggaatgcgccccagggaggaagccagcgcctggaggtcacgggcgttccctgcgccctgggaaatgcggcccgtcagccgttccatgtcccggacgtttttcaggctctcccgcagcttgctcatcaggtagggttcctgcaaaagaacggagatcatctcctgccgcgcctggagcttttccaggtcgcacagggggtggagcagccagtcccggagcttgcgcgcgcccatcggggtgctcgtcctgtccagggttcccagcagggaaagcttcacgccgccgcgggaatccaccaggtccaggttcctctggctggcctggtcaatcagcacggcgctctccgtggcgcgcacggaaatacggcgcaaatggtccgtggggcggcggagctggtagcccaggtaatgaagcaccgcgccagacgcccccaaagcggcggtcatctccccgcagccgaaaccgtccagggaatgcacccggaagtggctcagcagattgggaatggccgtggaaggcaggaacgtatacccgtcgtaataaagcgtgggataggcgccggggaagcagtccgtctgctcgtcgctgatcagaagttcggaaggattgatgcgggacagctcgtccagaagcaggtccatgtgctcaaactgggccacggaaaattcccccgtggtgtggtccacgcatgccaggccgaaatgctttttatccttataaagagccacgatgtaattgtggcgggaggaatccagcagattcatatccgccagggttccggcggaaatcacgcgggtcagctcccgctccaccagcttgcccggctgcggaatggtggtctgctccgcaatcgccacgcgcttccctcccttcaccaggcggccaatatacccttccgcgctgtggtgaggcaccccgcacatcggaatgccgtggcgcttggtcagcgtcaggcccagaatagaggaagcctccttggcgtcctcaaagaacatctcataaaaatcccccagccggaaaaacagcaggacgtcctccggcaagcccttcttcatgcgaaggtactgatccatcatcggggtggaggtaggtccggaattactcataaataacggtgaaagagtaatctgattgcggctgcaaggcaagattggaatcttgttagaaccgggccgccatgccgcttttccaaggaaaaaccggggagagcgcccccaaatccctggtaaagaaaatgcgctgacgcaacaatcattgccccttttttcttccgggccggatcaggcccccatcatgcggaggagcgcaaacatcctgtcaccgattcctttgctccgacggacggccaacaagccgtccctcccctccggaaagataaaaaagccgtgccgctgtcagacagaggcacggcggaaaattcagatcaccgggggttagtactccaccaagggggcatccttccacagggtgtccataccgtagaatctgcgcgtttcctgccccatgatgtgaaccatcacgtcaatgtagtccaccacggaccacagcgccacgggcgtgtcttccacataggtggggagggcgcccgtcttttcccggacggattcttccagctcccggatgacggcgcgcaggtgggggacggacaagcccgtgcacaccaccatgaaatccgtcagggaagacatgccgcgcaggtcgtacacccgcacattttcagccttggcgtcatccgcggcgcgggcgcacatcctggccagttccatcgcatcgttggctaccataattgattcgtttctattggattatttcttctcttcgccgtccttgccgtactcctccacgggattgtaggaaaaggggtcctgctccgtctggccgctctccttcttccgttcctccgcgtcctccgtgcggtcttcttcggcatccttcttcacggaagaaccggaatcacccttcccgggctgctcttccacctccgaaggcatgggaggcggggtcaccttggcgggaggattcttcatttccccgtattccagaatgtccatgacctgggagccttccagcgtttcaaattccatcagggcttccgtcagcatgtccagcttgtcccggttctccgtcaggatggtcatggcgcgttcatacgcgctgtccaccaggaagcggacttccgagtcaatcagttccgccgtggattcggaataattgcgggatcgcgtccccaggtcgcgggcaatgtacacttccccctggtgttcgccgtattcgatcagccccagtttctcgctcatgccgaactcgcacaccatgcggcgggccaggctggtggcgctcttgatgtctccggtagctccgctggtcacgtcgccaaagacgatttgttcagcgcagcggccgcccatcgccacgacgagctggtcaagcatctcggaccggagctggtgcatcttgtcgtccgaaggaagccacatggtcatgcccagggctcccccacggggaacgatggtcacccggtgcaaaggttcgctgtgcggggtcttcaacaggcagatggcgtgtcccgcctcatgcacggcggtaatgcggcgcccgcgttcattaatcgccaggctgcggcgttcgcggccccaactgaccttgtcgcgggcttcttccagttccgcttccgtaatctccttcaatcccttacgggcggccagcagggcggcttcattgatcaggttggccaactgggctccggagaagccggccgtgccgcgggcaatgcgcgcaaaaccgactccgggagccattttcacctttctggcgtgcacctggaggatttgttcgcgcccccggacgtccggaaggttcaccaccacctgccggtcaaaacggcccggacggagcagcgccgggtccaggatgtccgcacggttggtcgccgcaattacgatcacattggagttgttttcaaaaccgtccatctccaccagcagggcgttcagcgtctgctcccgttcgtcattgccgccccccatgccgtagccgcgctgacggcccacggcgtcaatttcatcaatgaaaatcaggctgggggccgttctcttggcttgctcaaacatgtcgcgcacgcggctcgcgcccacgcccacgaacatttccacaaagtccgaaccgctgatggaataaaaagatgcattggattccccggcgatggcgcgtgccagcagggtcttgcccgtaccgggagagcccaccatcagcacgccgcggggaatggtggcgcccaggtcacggaacttttccggattgcgcaggaattccaccagttcccatacctcctccttcgcctcgctgatgccggccacgtccttgaacgtcaccttgttcttgtccggggcgatgaggcgcgcccggctcttgccgaagctcatggcgcccctggccccgccgctctgcgcgcggaacatgaagaacaggattaccagaatgagcacgataggcagcaggttcagcagaatgccgccccaggagccggactcgcgcttgaacttcgtatccggccccagcaactgtttgacccggtctccctggaattccagggtaaaaggcacttccacgcgttcaaaacgctgcttgtccacggaggcgtcccccgtggcagcaggccagatgcgggtgacaatctggccgaccagcacgttctggttcccgtcttccgccaggacaaggccctcatttccgcccgcgatgcggccttccagagccaggcggttgaactcgggcacggaaagcttctgcgcttcttcaggaataatggaaacatttttccccgcctccgtccggtacgggctttccaccatcctgtagccggaaagctcgttcagcagaggcttgtcccggtccggcagggacatggaataggacagcacgaagggtttcatttccaccttcggctggatgtcctttttataaaccagcgcatggatgacgccttcagagccgttctcgctcagcaccacttccacgggggccttcggatcgttcagcaccacgcggcctgccttgtactgggcttcaaaggattccaggttttccttgcggggccccagtccaaaggattccggggtgaaaaatccgaacgcgaggacgcctgcaatgagaagaaccatgacccacacgccccagttgggggattcgggctttccggagccgggaaatttgggaggacgaggaggactgggtggcattctgtcagacataatgtggttagcacacagaagttaatgaatcgggcggcatgatacgcgagtccttgtaaaataaaacttttttccgagacatgccatacagccggcgcaggatggaaccggaccgttccgggcccggaagcgccttccggcaatgaggcaatagacagcgcgggattcagtcccgtttcctttttctgcgtcgtccctcgtgattcgcgctttccccgttcatgcgctgctggaggcggcgcttccactggggcatcttttccgccgtttccgccggatgaaagccgctccccttccggctcttttcctgccaggcgctctcctcctgcgcctccagccgttcccgccgccgctgttcctgaatttccgccagtttcctggcgcgccggatttccacccgcttgctcacctccccgtgggcggaggtcacgcgccacgggccgatgcggtggggatacgtgatgggcgcgcagatcagctccgcatccagaaaccgcatggagcccaccagcaggttcttgacgtttgccagcaggccgccgtccgtccagacgccgcccatgcccatttccagcagaaaagccaggtgaagcgtttccgcctccgaggccagaatggaaaaatccctcagggaaatgccctccgccggctcttcatgcggggcggccacggaagcggcccggagaagaaacatcgtatcccggaccttgcggctcagggcgcagaccagttcccccaccttgggacgggcgtcaaaacggtagtccttcacctccaccagccataaatcccggcgttccggatgatacagcaggaagtccatctccttgcaccccccgcagaaattctgcgcctgccgggcataatagtccgagcattcaatgcggcacacgacgtagccttcatcgatccagaaacggtggactccctccacgtaatgagcttctgacggcttatgactcatagctcagcttcaaatacctgtccgcctgctcgatttccgcttcaagagattcgataggccccacatcctccagggattccccccaggtcacctttaccccggagcggtctccccgcggcacgctcatcccgaaaaacttcctctgcaccatggcattgcggggttcggaaagctgaatcatcagctcccgcagcaggaacaggctgtgggaggacagaatcacctgcacccccgtcttggcaagccccgtcagggttttcaccagcacgggcagatgggaggcgttcaggttcatttccggctcatcccagaacagcacggaccctcttttcacggaaccgttccggatcaggtagctcagcgtgcccagccttttgaagccctccgccaccaggctcatctcgatcggctgctgtccgggacgctgcaaaaagaaccgtccgtcgcgcttcaccacctccccgccgatgatcttctccagcctggcgaccacgcgcccggcgtccgtgctgataggttccgctgccgcatccacgtccaggtaacggcagaggtcccagctccccccgtccaggaactcggggaacctgctccccacctgtacaaagctcgggtaaatggtcagaacctcccgcgccgccaggaacaccaccggcacgttcaggaagcgtttgggcatctcctgaatgctcagcccctcctcctcatgccccgcctgaaaatcaaacaccaggttccccatgccttccggcaccccgtccccctccatggaggcctccacatgggcatgggcgttcccgcggttccgtgccgtcagcccggccagtccgcgggacgcgaagacccgcatcaggtccttccggagccgctgttcctccgcccatttctccggcagggacttcctgcccccgtccgcgctccacttggctacggtatagcacaatttcagcagatggctcttgccggaatcattgccgcccaccaccacattgattccggggacaaactcaaaatgttcgctcccgggaaacaccgtcacgccgcgcaccagtaggtcatgtatcataccgttcccaatgtagcacagaagcgcatgccgtaaattacaaatgccgccagcttccgtcaccgggaagccttccggaaaagcagcggaaaaccgggatgaaggaaaaagattgccgcccggctccgtccacgcttttccagagcctgtctcccggaaaacgcagaaaaaacgcctgctcccgccctccgccgcctttccccccgcccaagtccgcatacacccggaaggcggcgcattttaagcttcccattgacggacgccttattaaagtagtccgcatgagcgcacaatggaccaccgccagggaatatacggatatcaagtatgaaacaacggacgacggcagcatcgcgaaaatcacgatcaaccgcccccaagtccgcaacgcgttccgtccccagaccgtgcatgaaatgctcaacgccctcaacgccgcgcatgaagaccccaaggtgggcgtggtcatcctgaccggggaaggccctgacgccttctgctccggcggcgaccagaaagtgcgcggaaatgccggctacatcggtgaagacggcgtgccgcgcctgaatattctggatgtgcagcgcaccatccgcaccatgcccaagcccgtcgtcgccatggtggccggctacgccatcggcggtgggcacgtcctccatgtcgtctgcgacctcaccatcgccgcggacaacgccaaattcggccagacgggccccaaggtcggctcctttgacggcggtctcggctcctcctacctggcgcgcatcgtgggccagaaaaaggctcgggaaatctggtacctgtgcaggcagtacgacgcgcgggaagcgctggacatgggactggtcaataccgtggtgcctctggaaaagctggaagaggaaacgctctcctggtgccgccagatgctccggcacagccccctggccctccgctgcctgaaagcctccctgaacgctgactgcgacggacagatgggcctgctggacctggccggaaacgccaccctgctctactacatgagcgaggaagcgaaggaaggcaaaaacgccttcgtcgaaaaacgcgcacccgacttctccaaattccccagactcccgtaacccctccgcaccatgtcccccaactccgacaacgaaggcgccacccggaacggctccgccggcagggaatccctgcacgacctgccggaacatgaaaacatcgtggaacatttctacgatccggaggaacaggccggccaggagaaacccgtccgtgaaaaaacgcccttctccctgatcggcaatcttatcttcctgttcaccatagccattctggcggctatttcctggctgatttattcctcctggagcccgcagaacacggctgacctgcccggcttccgccaaaaggaaaacgctccggacatccccaaaatcctgaaacaggccattaacagggacgcctccgtttccttttcggaagaagacatcaaccgctacctggcctcctccgtccatccgcagcagcacggagccctggccatcttcgccaccaatccggcggtaggcatccggctgcacggcggcaaggaacagccggacggcgccatcggggaaggctgcatggaaatcatcattgaacgctatacgggcatcgactcccgccagacgatttccctgttcctgacgcccttccagtccatggacccgcacaactacatggcggtgcagacccgctttgaattctacaatgacgagactctgccggggggtatccacgtgggtggcaccatcggcagcctttccgtcccccagggctacatgatctttctccttcccgcatttgaaaacctgctccaggcctatctgccgctcatccacatgattgaggaaagcggcatgggcatccacatcagtgaaggcaggctgaacctgacgcctccgcaaaaacgcacgctgtagcggaaatccgcaggggttccgcaagggccaaacaccaaagctcaaaggtcctattcaaacctttgtctccggcatttagtttttctccaaatccctgaccatcagggtcatgtattcttccggccaggaatgggtaatctgcccggcgtcattgaagaccgccaccaggcgaatggaatcccgcccgtccgaaagcaccagcacggtttcatccttttcaaaatcgtaacggggcttgccgagcttgaaggcggcattcctgcggtccgttttcagccacgtgcgcgcctgttccatcgtcattccccgcagggcgcgggcatccttgaaaacgcgccgcgccgcattcatggccgcaggggtggaaaccaccatgctgttgcgaaacggacgggtttcccacatgcggtcaatgtcacggtccagcgcgccgcccatgcctccggaaaggaaaaacacggctgcgggccagaccagaagaatacctactacccaagccgtcaaccgtttacggctcctggaaagcgccgcgatgccctgggctattttcccccatttttccaccagttcctcatccgcatgcccgaacaggaaattcacctgcctgcgtttaatgccgttccgcagttccgccaccgtccttcccttctccggagccaggtcctccagcgtggggcttccctctacaaaatggcggaagattttaggccacagcacgggaactaccgcaaaccggatcgtcagcagaaccagactgcccaccaaacagccgctcacgaacagaacgtcaaacgggcggctgaaaaaatagtccggattccacatccaaataaaaggcgcggccagataaatccccagggaaaacaggcaccatgaccagacaatggcggaaaaacggctgaccgccacggccacccccagcaggaacaaaaaggcccccagggcgattccccacgggaacgccccgtaaatggcggccggaaaagccagaatcatcaacgccatgcctacgggctgccgaactttttgcatgtccggaccgtaacacaagcctttgaaggcatcaagaaaggaaggcaccgcagtcacacagggccgctccgccttccccttatttcagccagccgtactccatgatgagcgccgcttccacttccgcattcttggcggcttccgcatccagattctcatgcatggttttaatatccttcctttgcgccagatattccttgcctgataaagccatcctggactttttaaactcaatttccttcaaaatgactttcttccagatttcaaatcttttcctgctctccatcagcgcggccaccttgatgcgcctctgctgcaaatccatcacaacctttttctgcatcagatcatgattttccttggccgtcttgtattggaaccaggaggtcagccgggtgtccaattcttcacgcaggctcatattcacctgcatgtctccggcgcctgcaaagaacccctggtaagtgccgcccgtactggaaaacaaggtagggctgtaaaaattaatatccacggacgggaaaaacttcatcttggcatttaaaacctgcaacctggaagcttccaattccatggctaccatggtcaccaccagcaaatccaaatggcgggaagcactcttgtatttcctccagtccaccctgggcatcgtttcaggcctgacgagccactgggcatccatattccccatgaggacagcaaatccctgggaaatttcactcactctcttctcccagtcatcctggatcaatttcttctgaactccatcatcgtcatagggcacggcatccagccggttcttatggctgacacatgcattctgataggaaagtacctgccggtacaacctggacaccagctccctttttttcatctccaaggttttccgggccgtataaacggcggatttggccgaataataatcaaaaggtatctgcgtcagggacggcatattaaacagaatattggtattatactctacatcctgcgctgttacacgggtcagctcgctcagctcttttgtcagcatccaatccaggttcacgcccggaatgacctgggtatacacgctgataacagaacgttccgtagccctgagagcctgttccgagcgcttcaaatccaaatttccctccatcatgacggccattgccgtatcccatgagatttccctccggggcagttcgtcccagttggggatggcagccattttatccatcagctccaccgtttttctttccatgtgcttatccacggaacaggaagtacatgcaacggcgcaaatacagaaacccaacagagtcctccaccgagccaccctgaatggactccagaaaaagctgcaaaccgaggagaaaaggagcatactggtgcccgtttcataacttctgcctctgaaaagtcaagtaccaacacagcagaaccgggaaaaggaggaagggggaagatcagcaatggcaagccgaaatcctcttccatcccctttctgaaaggggttccattttccaaatttccttccttgacagatcataggaaatactacaatctccttcaataaacattatctacagttatttgttatgctccctctttcccagaaaatctccctggcctgctgttcccttggacttctctttttgacgcaatgcggcggaagcagcagtagcggcggcaatgcccccgataccctcaacggtaccgtattatctatcaggctgggaataacggcatcggatttcccgaatatttttgaactgatcaccgccaccaacggacagtccagtcttcaaacccgtggacagaatattgaagaatggaatggctctccaaccgtgatttaccacaagacgggcaataatgcagctactctgaacctgcgctggattgcagggaaaaacaatactacggcatattccatggacctccctgctctggaatttgaccaatccacccatgcatccgtaggcggcgaaggaggaacgctttcacgccagcccgcaggacaagaaatgcaaactctcaatggcgtcagtgcagacgttaccattacttacagcaactaatcatccctttccgtcttactcatataatttcaatatcctccatctatatgaatactcgtttttgcatcatggcatctctgctcctcccctcctttttgtgcacgtccgtgctcacaggttgcgggggctccagtaaaacggaagaaatctatattcctgtcggaacagcccgcaatgtagaaatctccctggaaaacaaccaggtatatacggttgcctttgacgttgtttccacacacaacgccaacatctattccggagagagcgcggagcccagtgtcgcgtccatgcacgtcagaggctatgttcccgctgatgacaccgccgctgaaatagctttttactggtacaccaacagagccggtgaagaggccttcccctgctacttgatcatgaccgacgttaaaaatgtaaccaaaggcacaggaaccgctacatgcgccctgtctgatccctattttgccgatcctgccgttaccgaccggcccggtactctgacgaaattcaataaataaccagaattcattctctgacttttaaaggcctgcggacttcctccgcaggcctttttgtatcaaaaaaccgcatttccaaacgaaggaggaacaattatttaccccccggcatggggcatgagcactgcttacttcaacactttcccaatagggcgataggcagagaaggcaaccggcacggaagaaagcaacacacagatcaaaagtgaaactcccaaaagccacaaatcctgccgtatgtccgcatacgtcaacaccgcatcgcccagcttgaaaaattctcccaggacaatcttttgagtcttcatgaaggcccatacagctccggcataagaaattcctatcaggaatatgttctccacaataaatgtcagcaccagcagagccggacgcaccccaaaacttttcatcaatgtatagacatactcgttctgccggaattccatagacgccagggcaatcagaagaatgcctacaataaccgcaataccgatagaaaaaccggtccggcattccatctggttgctcatcagcacttccaacctcttcaacatgctcacatgagtctgaaccatcgtcatgctcccgtcatagcgcaccatattattaagcgtttcctcaatattctggatattgtccgccgtcatctcatgaaccctgattacataccggtcattgcttataggggcctcctgcccggtattgaaagctccttccggagccagcaccactcctgaaggatataatttccctaaaaggtggttctccggcaacggggatgcattcaatgaaaagtcaaaatccccgatgacaactctgcacggtcccggatgcagggaactcctgtccgggtgaaacaaaaggacgacaggcacttcctccagccccagatcagcaagataaaagcaggactccatattgtattccagaatggggaaaaccgcctttcccacacgggcgaatcccgcgggagcatcttttaacgccaggacgtcgcagccatacaaggaaggcaattcatgctgaagcaaattccttttggaaggttcaccgtcgcgcacggtatcaaggactacaatcagatcagccccgtttcttttgatctcatcatgcagcatctttgcagagagaacataattcgcaagaaacgaaagggcgcacagggagaggaaaaacgctaccaatacccgggaaagcgggctggcgggcctttccctccaccggtgcagagtatccttaaagagatacaggctgattaaaatcaatgatttcatgagtcaggtcaaagagccgggaatcatgcgtgcttaaaatgcatatcttatcggacgggtattccctgatcaatttcttgatgatctccgtattgctgtcatccagaccggaagtaggttcgtccagcagcagaatatctgaatccttcatcagcgtacgggccagagccgcacgctgggcctgtccgccggacaggctgcccgccttcttgtgacgcagggattccaatcccaaacgctccacgaggtcgtccactctttgtgtccactgttttttaggcagcatggccatctccgcacacaattgaagattcctctccaccgtagccagaggcagcagattgatcccctgaaacatgtaacttacttccttcctgcgataaagagcatcagtgagagaacgccggccgggagcaagaacctttccgcgctggggtttcagataaccggccaaaagtttcagcagcgtggtttttccgcatccggaatacccttttaaaatagtgattccagatgaaaaaagcctactgtagttttcaaaaatccattgctttcccgagtagctgaaataaacggattcacatgccaatttcattttttccgtacaatcaattccgtttctccatttacgatcagctccatatccggatgcgttttttcaagcagttcctgccaggaggaacatttccttccttccggactggaggccagcaaaaccttattgagacgaatcacctctccggaaggagaataatagagcctggccgtgcaattggaacccagcatggcgtgagcccggtcatgatcctttggagacaggcggaaaaaataagccagtaaatcccccccgctggaagtgtttttctctacacgcttgaaagcaaagttcccccgcagcatggaaccgtcactcatgggaacagccagatataatgattccggcggcagcctggtcaaatcaggatccgctatggaaatggtaatataataggcggaatcatcacaaacggtagcaatggctgccgccgcatccagatacagggatacgctgttgtcccgcgggaaggaaaactggtactgcagcttgccgtcaaagggcattttaaggatgtatttttcctctttcttgctgaagtccaatctggccttgtcccccaccatggctaattcctttttggtcagttcaatcttgtccttcaaggatttttccgcccgttggccgccttccggctgtttgctggcatactgcctttcctccctggacagggaagaataaaatttcatttcttccaattgtttctccaattcggacagttcctcctccttggcgatacggtcttttaaaatcttgacctccagctccctccgctccatctcaatttcatcctcattgaccgtagcaatgatggtatcccgccgaacgcggccgtccgccggaatccagttgctgacgatgccgtccgccggcatgctaaaagaacgtatcctctcagggacgaccttggccctgaatacattgatgtagcagtccctggctgtttccggaacttcttcttgaacgttcggaacagtctccgttccgaagccatgcggcaaaaaagacgccagcatgcatgaaaatgtcaccaggcataattttccccaatttttcaacatatttcctgcaaaaaaaagcgcggccatccttcacgaacgaccgcactttgaatataaaaactgtgactcatgggccactcaattaccggtaggataatagaacaccgtgccatccgttcccgcccaggggttcccggcaacaatagctccttctccgtcctgaatgccgctcacgaacgaaacgttgcccgtacacgtaccctcggccgtttcatactttgaagaggtattgaatgtgatgtccatgttcacctgaacggagccgtagaaaatcaccacaatcggaccaggcaaagtgacctggccctgagcaatcacgaagttgcccaccagagaagctttttccgcagtcgtccttctgtacaccatgtgagtcgtggcgggaatagaagtaccggcagcggctccctgaatcttcgccagaggaaggtcggtatcattgccatccagctggatgatgagagaggaggcgttatccgggttcacctgatccgtaatcggcactaccatattcagcctgctgcctgagggaagacaggttccttctccactatcgccgctgcctccgcaggacaggagcccggcagacactgccgccagagacaaaaaggagagagaatacttgttaaatacacgggcaaacataatggaaaatgagtttttttcaagatagtgattcttgggagaacgtcaacaaaataactgcattgatctgcatcttcatgctgttccgcggactcaaagcccccggggaaaagaacggacggcctggtttatcttccccagcacatcaaaacacgcgaaatacggaaccccctctccgcatcttccagcagcgttcatgcataagcagcatcatcttatgatcaacctacctgaccttttccaaacgccgcttgagcacgcgccccgtgatgaagaggggggccgcccccatcaggaacagcagcagggagtccttccagggggtaggcaccgttccttcgtccgcgctgtagccgggatcgtccggagccttccccgtgttgccccacggcaggggctggcggcgcgccaggaaaatttccgggcggtccagcgtatcacggctgacgcgctggatttccgcggattcatccagcattacaatgcggtcattgacgtaaaaggatttaacggagggcttgcccttcccctgctgttccagttccgcaatcacctgcctgtagtttttctcatagccgttgaccgccgccctacgtacccgccggaccgcggccttggcctgttccggatcgtccgccccgatggcggctatgtgcaggagcgccatcttgagcagcttgaattcctcaaattctctgttgtccaattggggctgctccttgagctcgtccactttctcctgaatggtttcacgctccctttcccatacgtttttggaggcctggtccaccaccatcgtttcaaaggagtagcgcagggggcagaattccgccaccagcggcacgcggcccggcttgaggcgcccgtgttcatccgtgcggtgggcggaccacgggatgaactggttcatttcatcaaagtggacaatggccccggccatcagtatctggggaatcagcagcaggggcaccatattgagagccgcgcgctccgttttggcaaagacggagaccagcagggacaggcttacgccgatgaaggccgtcagggtcatcgtccccaggtagatcaggaacatttcatggatttccaggatggcgttccccacccacaggaagagggcggactgcacggcggaaagccccgtcagcaccagcgccttggcgagcacgtaaccggtcacgaacaccttggcgttgctctcccgcttgagcagggcgcggtccttgagcacttcgctggccgccccggtcaggccgaagaacatggccacgatggtcgccaggaacaaataggaaggtatgtgaagggcggtggcaaacgtgtattccgggctggaagaggcgcgcagggtcagggaaatcagcagggccagcaccggcccttccagcagcatggtgtacagccccatgcggctccgcacgcggcccaggaaggtgcgcacggcccagatgcggaaaagccgccagagctgcatcacgctgcgccggggggcaggcgggaattccagcgtgccttcatacaacgttctgggcgcccctccttcatggtggtgccccattacgttgcggaatcggtagccttcaaagcgctcctgccacagccgggggtgctgccgcctgcggcggtcatgccaggaaaggggggcctccagcacttcaaacacgtagtccgcgccgccggccgtccgcgcctcctcggaaacgtcaatggccatatccacggccgccttccggaaatagcgcatcatgcccggcacgtccccccagtaggccatctggccgccgtggtccagcaccagcaccttctggaactggttcaggatggccgtgctgggccggtgcatggtggcgatcaccatcttgtcacggctcatgttcagcatggtctgcatgaccagcttggcgtcggaggtggaaaggccgctgatgggctcgtccagcaggaagacgtccgcaatgcccgccaggtcaagccccaggttcaggcgcgtgcgctctccgtcggaaatggtgcgcgcattcatctctcccacgcgacgggaggcgatgtgcgtcagccccaggaatttcagaatggcgttcacccgcctgacgcgctccgaccgggtcaggcgcggacggcggatgatggtggcctgggcgatgtgctcggaaacgctcatggccgcatccagaatgtcctcccgcggaatgaaggcgatgtagggccggatcaggtccggagcgctgtacagaagctggttgttgtaacggatgcagccgcgcgtgggcggaagctgcccggccagcatggagagcagcgtgctttttccggatccgctggggcccaggatgcagaccatctctccgcgcttcacggtcaggtcaatgttgtccagcacacggccggaacgcatgaattccttggtcacgccctccacgctgagggttctgatggcgtggtattcttcatccagcaccccggcggaaaaacggcagcgcaaggcgtgataggcgttcaggtgcaccacgtccccgtcgcgcaaggaaacccttccccgcacgggcctgccattgagcagcaggggcatggaagcctccaccacttccagccagccggaattggtggcgctggaaaaggaaacctccagcaccactccggcggccagacccggcgtcagcagcatgtcccccttgcgcgccttttccggcaggttggttacgcgcagcttgcgggtcccggggtccaggcggaagcggcgtccgatgtccgacatggagttctgcacctcccccatggaaaaaggcccctccccgtccagcgtgaaggaggaatagtaggccatgcgcacgttctcaccggggtacaggcgccgcccgtccaccacgaattccacttccggcctcagaacctccaccctgcacgccaaccccatgttcacgcgcacctcgctggcccgtgaacgcacccggctgatttgcagggcgccgttgtccagggaaatatagcatacttcctgcttgccggaacgcttgcaatccaggaagaacgcgaagtcttcaaagcttagcggacctgacggcagcagcaccacctgcccgttggtcagcggcattaccccgccgggcggcaggtggcggccgcgcaccacaataggcctggagccgtcattcaccaccagcaccaggcgcgaacaccggatcaggcggaaggaaatgcccttgtcctgttccggcagggatacctccgcaccaatgccggaggaaaaaccgacgctgtacgccggctcctgggcctccacgtccggcgtcatcagaagctgcctcaagtggtttgccgtacccggcagttccaggccgtacgtcacctggtcaaacagctccccggtcatgcgggggtctcccgtgttgatgagcagggaaagcacttccagcgcaatcgccatacgctccgtctcgtccctgccggaggcggcggaagccagcacatccgccaccgtcagattggcccgcatggaacgctcgaaacggttggaaagccagcggtgctccacttccgggaaggtgtagcgcagaatgtccagcgcggcatccgcgtcgcgcgcgctcaagtggcggcgcccgctcagaatggtagcaaacaggtccaccagcgtgccggcatgcactttcatggaaccgtcgtcccggcgcagccacggcacgtaggcgcccagcgtcctgaccagattcagcctccagtgaatcagcttggagggtatgtcaaaaaaccatcggatcatgccagggaacgcgttgccggaaccagtagtacagggattcccggcctacctcaagcgcaaccggaatttcacggagaaatgacaatattttctacagctttatcttgcaataggtctggaggaagtatagttctgtccaatgttcatgctttccatgcgaaagcgagccaaatacatcaacattatcacaacatggatattttagtttctactctttgtgacttcgccgccgactaccagggcaagctttgcatccagggcggttttgactccctggtcgcccgtcagttccccgtcgtgcaccccgtctgcgccgttgccctgcgcatctgcctcactcctgaagacgaaggcacccacgaactgggcctgagcatcgttgacgccgacggcacgccgctggacaaggaacgcatgcccatcaagatcaacttcccggtgcccgctttcccggaaggcgtctccttcttcacccgcaacctgattatgaacttccagggcctgcgctttgaaaagcccggcaactactccatcgacctgacggttgacggcgaactggcctcccgcgtgcctttccgcgtggtgcaggtgcaggaagaagctccccaggcctaagaataatcttctttttcatcaaaccgcctcccgttcacccggcaggcggttttttgttggggtgcatggagcccccgtctgcccgaaggagggagatgaaaaccaccggttccatgttcccatgaaagccggttcgctcacaaagccttccccccgggagcggaggtggctttccggccttcgtactgaaaagcttttcaaagcggaacctaggctcatttttctcttttactaaccggacatggctatgagggccgggagtccctctttcccgggagagcgcaggcaggctttcgccgggtggggaagcgccatggttggcgcagccctcttttctctttggaaagaaaggaggtgcgccttttttgcgttctccagccccctttttcattgcggttccccaccggattgaccatgatacgaaccgctcccacccgccatgcaaaccccacgcctccagtacgacaggattatcatcacgggcgcatcgtccggattcggggaagcctttgccggaacgctggcccctcatgcggcggaactggtgctgattgcccggaacggggacgtcctgcgccagcttgccgccgcgctggaaaaacgccaccccggcctgcgcgcctccgtctttccctgcgacctggcggatgaagcttccctggacacgctcgtttcacatctggacagccttcctccgggcagaaccctgctgatcaacaatgcgggagccggggattacggagaattcgcggacggccgctgggaaaaaatccgcgccctgctgcgcctgaacgtggaaagcctcacccgcctgtgccatgcgctgatcccctccatgaaacggaacggcggggacatcatcaacctcagctccctgggagccctcctgcccattccggattttgccgtttatgcggccaccaaggcttatgtttccagcctgtcggaagcgctgcggctggaactgcgcgaacacggcatccgcgtgctggccgtctgccccggcccggtttccacgggcttcggaaaagcggcccggcgccccggctttaccggaaacatgatgccgggccgcaacgcctttgatacgtccgttgaaaccgtcgtgaaagacagcctccgcgccctgtcccgcgggcgcgcacgtgtcttccccggcatgaagatacggctggcggccctgctgttgagcattgccccgctggggctgatccgctttttcatgggcaggcgcccgcggaaagtccagcctgcccccaacgattcaccttcttcagcatcatgaaagcacaccgccgcggaacaccccgcctcacctggttcaagcttgcagtctgcatctgcctggcagccatggcggcatccctgttcacaccgtatccggcccagattatccgggccctgaaaggggaacccgaacaggcgcccccggattccggcgcctatccgccgcatgaatccatccctgcggaacagccagggcaggaagagcctgcgcccccccttactccatccgttcccggaaaggaacctgaagattcacggctggccacgccttggacgccggagcgcacgattgccctccccccggtgcagtatccccccttcccgcccgtcctccccacgaagcccgcggagggagccatgacgaatatctacgaactggcacgcggcctgaacctgaaaacgcaggtcaatttccagcccggcaccctggcttccagggacagggagactaaaagcaattaccagatgaccctcaccctgaacgtcaagcagcccaaggccctgacaaagaaggaggacatcctgaacatcaaccccaagctgggaaccatgcttcccggcctgtccaccctgttcaagcatgcgcgggtctccccctattacgggcagatttacgtccgcaagcagacggaaatccgcaagaacctggcctccctgctcaagctcctggaccgccataattactacgatacggagacgattctggaaaccacctatccggatacgggcagaaaactcctctggctacagagtgaaatggacgttgtttccgacggttcggacggggaccgcctgtccaccatgccggataaaatcctgaaaagctccttctaccagcccagcacttcctaccgctggaagaagcgcacggacaagcccaatcccctcctcaagccctggcagcagaggctggcttcctacaagaagacgctggaaaaagcctccgccgcggaaaaaccggccctgcgccgcaagatagaccacgcggaacgggtcattgaagaattgaagcgctacagtttcctgatctcggaatacgatccgttcatcgtggtcccgctgggagtggtcaaccaatcctctcccttttccccgcagttcggggattacgccgtcgtcatcgtgggggacaagttgtacccggccctggtgggagacgccggaccgcgctacaagacgggggaaggctccctgcgcctgagccgtgaaatcaaccccaaggcggggccttacagccgccccgtttccgacctggtagtcagctacctgatcttccccggttccgcggatccggaagccggaccgcccgactacgagaagcttacagccaaatgccaggagctgctccatgacatcggcggcatgggaaaggatttcaagctccaccagtgggaggacctgctggcgcccaagccgccgcccgctccccccgcgcccaaacaagggagcggcaatcctgcggaaacatccgcgaacgaccagaagaaggcggatgccccgacggaaaatccggccccggcagcctcccctgtcactccgcccgctccggaacccggcaaaaccgccgcgtaggctacagggcttccttccaggaaaagagaaaggccttccacatgcgggaatgaacggtcccgcgcgtgatttttacctttcctgttcccggctgttcctgccgttggagcagttccagcgtatccagccccagccatgcgggcagtacggtggaaaaacgcagccgcccgttccggagggattccgcataaaacacgccttccttcagccagcgttctgcccggtccagccacggctgaacatcggaagtaggcaaatagcttcttccacgggagaggtcttcctcccggtcgcgcagaatgttcaccaattgcagccccatgccgtagtgcctgccccagcgtaaaagctggtcctccggctgcgtgctgaagcctgatcccagcgccagcaggcccagcctggtccagaattctcccacgcagccggccaccatgtaggtataatgctccagttgttcgggacatgaaaccgaggaacgggcttcaaaatattccaaatcccacgcctgcccctccacaatggtggacagcacctgcctcacgagcatctgctcacggggggaaagggcttccagcagcgccaggcattctggaaaacgggccagcagctccgcctccccccggtgcgtctggacggtggaaagaatgcccagacggccaaaacaggaggcggcggcctcccgggaggcgtccccggctaccgtcgcgcccatcatcctcagcagcgccaggcgttcccggcaatccatgtccacggtatccgccaccgtatccgtagcgcgcgccagcagatagcccacggccacgccggggcgcatctcccggggcaggaagcgcatgctcaaataaaaggaccgggaaacggcggacagaagctgacgaagtcctttcatgatttttgcaggcccagcctgtgcattttataatggagcacccgtggggaaatgcccagttcccgcgccgctgcggacatgttgcccggagagcgtttcagcgcggccacaatcaattcccgttcaaaggaatccaccatcgtcggcaagtccgcatgatcctctccgtcacgggaagacggggcgtcatggctgggcatttggagggaggcgggcaggttgtaaccgtaaatgcagtcgtcctgcgccgtgatgactgcacgctccatgcagttttccagctcccgcacgttgccgggccagtggtaggccatgagcatgttgatggctggcgtggacagccgcttgatatctttcccgtatttcaggttgaacttggaaagaaagtgttccgccagcagcatgatgtcccccttgcgcttggagaggtccggcatgacgatggggaaaatgttcagccggtagtacaagtcctcccggaatttgttttccgccatcaattcctccagattgcggctggtggcggcaatgaagcgcacgtcggaatgaagctccctgttgctccccacgcgggaaaaagtcttttcctgaagaaagcgcagcagcttcacctgcatctggaggctcaaatccccgatttcatccagaaacagggtacctccgtccgccgcctccgcccggccgatgcggcgggcggtggctccggtgaaggagcctttttcatggccgaacaactcgctttccagcaggttttccggcatggccgcacagttcagcgtcaccagcggcttgtccttcctgccgctcaggttcactacggcgcgcgctaccagctccttccccgttccggaactgccccggatcagcaccgtggcgtcgctgggggccacctggcgtatctgttcatacacctggagcatggggcggcagttgccgatcagttcgcccggattggttgttaaaagctggcgcagtttctcgttctccgccatcagggccgcccgttcctcatgcgcctgcaggctggccgccagcgcgtcccccacgatgttgcccacaatctccagcagcttctggtcccgttccaggtccgtttccctgtccacgggacggtcaatgctcagggtgccgatcacctgctgcaaatgaatgatgggcacgcagatgaacgccaccttttccccgctcttgcgggtacgggtacggttcaggaacctggaatcccgggaaatgtcctcaatcacatggggcctccccgtttccgccacatggcccgtaatgccctcccccacatggtaatggccgcgcttcatctcctgctcgtccaggccgtgggacgcttctatcatcagatcgttcccgcggcggatggtgaaggtgccgcgcagcatcttcatgcggcggtagagcacgtccagaatatgccggagcagcgccgtgccgttgcgttcattgacaatggcggagctgatttcctgcagcacgaccatttccaaatccggtgacttgtttatttcattcatgaagtccggggctgggcgaatattaaccgtacggtcctggcagaccaactactttttcttccaccgtcatgcagccggggaaaaagctgccgcgggaaatgcagataacgttctagtacttaactttgatgttgttatgaacgaaggagaaaagaagtttacaaaattgtaatgcatggcgcctctttcctcccgtttcacatgcccacgtctccgccggactcccttttcatcatttccgtgatgacctggaacagcgcgttgcggtacaggacgccatccagccgcccggtatttttccagaccacgggaaaggcgggcagatgggtctgttcaaacaatttcagggcatccgtcagatgggtgccggcatccagcacgggggcgcccgcgcggatcagctccccggcggtgggaggagggctcttccccttttcctccatctgccggcggacagccagaaagtcatccggataaatggcaccctcataagtcccgtcctttttcaccacaaaaatcaggtctccgggattccgcagcatcagggaggaaacgtcgtccagggaagcgtccggcgccacctggggcaccacatggcgagccaggtcatgcacatggacctgcgccatgggcaggttgaccacggactccggactgccggacaggctggcggcatacatggaccgcgcgcgaatcagccgccccgttccataagcgctcaccacgccgatcaggagcgggtaaatcatttccccgctcatggagaactccaccaccatcaccagcgcggtcaggggagcctgggccgccacggcaaaaaaggccgccatccccaccatcgcatacgccaccgtatggttgccctccatgcccagagacgtcaggaccgtactgaaaataaacccgaccatgcttcccacatacagcgtgggcgtcatggctccgcccaccgtaccgcagccgaacacgatcgccacggcggacaccttcaccagaagcaggataaacgcctgctgcgtgctgtaatcttcatccaccagcccggtaatcagggcctgcccgttgcccaccacctccggataaaaaaccgccagcacccccacaaccagtccggcggccatcaggcgcagcggcaggagggactggcggccgttcaaatacctggtagctacatccagcaggctgacccatcccctggccgccacggcggccgccactcccagcgcaatgcaccacagggactgggaaaagacggtaaagctttcaaacggcgaactgtacagcggggcgggatcccccagcaggtgcagcatggcgaacccggtgcaggaggcaatcagcagaggcgccagaatatccatgctcacggtgccgatgatgatttcactcacgaacaggcacccggcaaagggggcatggaacgccgtggtgaacccggccgccgccccgcagccgaccagcagccggagccgcggaatggatacgtgcagccgctgccccaccgcggacgcgatcaaggcggaggactggatgataggcccttccttgccgatggccgctccggaagcaatgctccatgccgcggaaaacaccttcagggcggacgcccggaatttgatcagcccgtttccgatggacatggcctccatgtattccgtggcctgtcccggcatcctttttttcaggaacagcaggatgcagccggccgccaggccgcccaccaccggaataaacatgcgccactcaggctccacctgggaaaaggtgcctacgcgggaatccgaccagatgcccgtgagcagccattgaatcacttccaccgtccactcaaaaaacagggacatgctggcgcccaccacccccacgatcacggcccacacgtaagtgacctgcctttcccccaccttccaatgatggaacagccttaaaatccacccgtaccagacggaatccggcggcggctggggctggggggatggagaattcatgggcaaagcggcaatattattccattgtgacaaaaaaacgcctccggatgttcgatgccgcagaaaatacctgcagtgcttcatccgtgaagggccgcaagacgcggaaggccgctccctccggagaaggcgcctgcccggcaaaggtcttgcaccgcgccggaaacctgctacaccggaagaaccccaaccccttttcccatgcctgaccgcacgccgcaacctccgccacggctatccccgcgcctccggaagcaggcgcttctgctgattgcctgcgtcatttcaggcagccagctgtacggcctcaaacatcccgcctccgtctggcccgcggaacgggaagtgctttccggccattccatcttcggacagccgggggacccggcctccctggtcacggttccgctgccctatccgctgaggccgtcctggtccccggacacggagcttgcgtccattacctgccaccgtttcatcgccgtgccgctcaccaggattttccagcgaacgctggaacattacggcatggagcgcatccgcgaactgcggctggacgtttacggaggctgcttcaacaaccgccccatccgcggaggctcccgcccgtccctgcacgcgtggggcattgcgatagacatggaccccgaacgcaataccctgtacatgagcacgccggaagccgtcttttccggaccggaatacgatgccttctggtccatcgtggaaaaggagggggccttttccctgggacgcgagagaaattacgactggatgcacttccagttcgccaggccgtgaaagtgcgcggaagcccccaggcggcaccggagcggcccgggcgtcagaacgtatatttcaggttgatgccgtaataaaaatcatcccccaggtccctctgcttcaccacggtcagcgcctggctgtagttggtgaacaattccacggtcaggcgcgaggtagcgcggaaggtaaaactcaggttgtaatccagggcgttggatccgtggtgcaccaccgggcccacgtaccccccgttgtagccgtaacgcaccacggcatccaccctcacgcaatccgcgatctcctcgtgcagccccgcaaacacggcgtaatagccgcggaacgtatggttgttatactgccagtagaggtccgtgccgccgaaccagcggtcggaaaaatgataggtcgtcttcaggccggggcgcgggatgcccttgtcccccggaaaaacaaagctgtgctcataccagggcatcaccgtccagttccccagctccttgatgtaatccagccggtactttaattccgcatggttccggtggtccgtggaaacgccgtaccatatcttccccacccattccttgtactgtatttctggaacgaacatgcacagggagccgtcccacaggtcaagaccctcgcactcgtacttgctggcccatcccgtctggaagcgcagataaacccggtcatccgtggggccggccagggaaaggggatgggggcaggccgtcttcaggtagtaggactgatcctggcaaaccgtcgtggaaccccaggcgccggggcatgacagcacacccgcacaggccgccagcaatagttgagtcgcagtgttcgttttcatattcatttatggttggacaggcgttttctggggcggcgcatccggacgaggacggcatccttccatgttgtactcccgctccgttttttactgcaagccgatactccgcccgcagccggataaaatgccttctgaaaatgggacaccatggaaaaaacaatatgcagcctccagagcaaaaaaacaaacctccattgaaagattgtgtcagcaggatttgtatccaagacagtattcatgaagttccttattcccgcgctcgttctgtccgcctgccttcccgcggcattttcgcaagaacaaattatcccgaaaccggcagaaatcacggtgttccacgggaagcctgcccagctcacgccggcgtccgccatcattaccgcgacgcaggacaaggctttcctgaaccgcgccaggcaattgcaacagatgctcggcgaaggaaccggactgcccctcccccttaaaacgcccggagaagcaccggagaatgccgcctgcatcatcattaaaaaggacccggccctggccgcgaagggggaggaagcctactccatccaatcctcccccaggggaatcattctttcagccgcccatgccaaaggcattttttacgccgggcaaagcctgatccagatgatgcccgtcattttccacgaccggaaggcggacaaatccgccgtccagtggaatatttccggagctccgttcaacatggtggactacccgcggttctcctggcgtgcgctgatgattgacgaggttcgccactttttcggtgaaaaagccatcaagcagatcatcgaccagatggccctgttgaaaatgaacatcctgcactggcacctgacggacgacgtcggatggcgcattgaaatcaagaagtatccccgtctgaccaccatcggttccaggcgcagggaatccgaaaccggtacgtggaacagcggcaagtccgacggcacgccgcatgaaggcttttatacccaggagcagatcagggacatcgttcaatacgcggcccggcgcaatatcaccatcgtccctgaaattgaaatgccgggccacgccagcgcggctgccacagcgtacccgttcctgagcttgaaatcacccagggaagtgcccaccacgttcatcgtcaacacggcctttgaccctacctcggaaaagacctatgccttcctgtccgacgtactggacgaagtcgtggcgctgttccccagcaggatcatccatatcggcggcgatgaagtgcgctatgcccagcaatggaaggacgttccggaaattgaggcgttcatgaaaaagaacaacatgaagagttatgcggacgtccagatgtacttcaccaaccgcatgtccggcatcgtcgccaaaaaagggcgccgcatgatgggctggaatgagatttacggccatgacgtcaacggggacggcggaggcaaagccggaaccaaactggacacgaacgccgtcatccacttctggaaagggaatacggacctggctaaaaacgccatcaaggacgggcatgaggtcatcaattccctccacagctccacttaccttgattacagctacggcagaatttccctgcaaaaggcatacggcttcgagcccattttcccgggcctggaggaacagtaccattccagggtcaaggggctggggacgcaggtatggacggaatggattgccaatacggagcgcctccaccaccaggcattcccccgggcctgcgcctttgcggaagtgggctggacacctgccgggaaaaaggatttcccggattttaaaaagcgcttgaaggaatatagcgggcgcatggacctgatgggcatcaagtacgccggggatgtgatcaaccggatagacaagtccgactttttcaacacgccgcagatcggcacatggacgcctgacgacctgtccggacaggagcattcgttcgacgtcaccaaactggtcaaggttcccggcaaatacaccgtgaccctgctctacgacaagggggcacacgccattgaaatcgaatccgtggccctgtatgaaggtgagaaggaaattgcccgggacgctcattcgggcaggagcggtaccgatcagaaaaatatccagtacatcctgaacgttccggaagccaggcaaggggcatcctacacggtcaaggccagattcaagggggccggaggcagcgactcctacggaacggtgtactgtgaagcgccctaaaaactgctgaatcaacccgcaacaaaaaccggaggggcttcatgccctccggcttttgtttcagcaaccgggatactgccgcttggactatccttcccaggcattgttctttttcaatcccatcaggtttcccaggcacagggtgcctttcacgaacaggaagcccgtaccttccatcaagcagagcggaattgctgccgccttcacccggagctgcgcaacccgggttccggttgcattaaaaaggcgccggaggccctcacttgcagacctccggcgcctgaatgaccggaatcagcggacgataatcttcatccgcggaaaccgggcgcagctcacatttcagccatcatcttttccacgtattggaaaaagatgcttccgtcctccccgctgatgccatagtctttggtatcctcgatattcgcatttttgatgcgggtgatgatataaactttggagaacatgattccccattgtccatacttgtcattatcaaaccaaacgtgatgattgtaggtcggctcgaagtagatggtccctccgtcatcaggctcggcgatcggaccacaatatttgataatgatgtggctgatgcccttgtagcaccactcctttccgcattgcggcttcttggagaggctggtagtcatctcgatggtggcatttgtaatgttgaaggataatttatcctcatcatggtacatgacccccttttgagggagagtcacctcgttctggatggagaccccttcataaatgaggcgcgcccctttccactccgtttccggcggagctatttcccctttcaggaagcaggtccctgagagagaaaccataattgcacaggcaattttgttcattgttgttttctggtttgttgttgttttaataattcctttttgaggaattccttcatttcctgaacagttttttcaggaggatttttcgcatcgtcccggtactgccgccagtcgatgcgcagcttggccatgaggcgcagttccctgggggagaaaggaacggtgcccggagcattaggcatgaaatcccgggaccggttgccgatgtaataaatctggctctggtcccatgagcgcttcatggtttcatcaaaggaagcccttacccggtcgtcactgactctggcttcccactggaggcaatccgccaggcagccgccctccgcccggttctcccgggcctgccgccacagggagagaatatacctgttctgaaggctgcacgccgcaggcgtcaggtacttgcgcgtgtattgcagctcatacaggggcttgcacacggccttctccctctgccccagggtggctccgttcactctctctggagtgggaacaatgcccgcgagctggccggccacataatagggcagttcctccggcatgcggatttcccacggaatcttttcattcacgaatacgccgtttaaaatggtattgaaggaaccgttgcggcaaacacggaacaggtagattccccccttcctgcacatgaacctcttataaaccccggaacccgcaaatctggaaacgcgcgtgcgcgcttccaccgggaaggaataccactgctccatggcggcggtaagaactttcccccacttgttctgttcccctatcgcgaggtctcccacattgttgaactggaagacgagggaggaggtggaaggatgccttctggcttccaccacgtaatcccgcctggattcattggaaagataaccgttgggattatagaaatacagggctatttcatggacgccctccggcacttccacaacggtccaaatgtcgggaccatccacaaagcccggatacacttccccgtggtcgtcccattccgcctccgtccgcacggaatccgtgggatcgaaaagaatgttgcggttatcattctccttgatgctatgcacccaccagcgcagggcatcccccttgttgcggttgagccccatcaatccctggatccagtaagaagacacggccccctggtatccgggataacccggaacggaggaaagggttcggaacgacacggtcttggccttaaactcggaattgctcatgggggcattcgtggcgcacagcgtggcgcgcgtcaggccgtacctcccgcaccagtcccccttcgtggaccagtcctccccgcggaacacaatgctcttccccgcatgcgcatccgctcccagcttttccagcctcctcaggactgcggcagggtcttccatccgggacggggacgggaacggaatctcatcgtcctgctgcttcctgtccagttgataagacagggaaccctttttcagactgacaagccctttcccatacgtcgccgcccagacacttccgtccttcagcgccagcagggaggggacatccgtattttccagtcccttcctgattctccggcgcaccgtcatcctttcggcatccagcacgtccactccctgcgtccggtagccgatgaaaatatcctttccctgccggaggatggaagacacgaagtcttccgacagcattttggcatttccctcacccggaacggccgtcttccgcgcagcggaaccatacagattactattcttccgggcataatcccggccgcgcaagaaacgccaggagctgatgccgttgctgtacgccaggccggaccaggtgcctaccagcacctggtctttttccgtacaggccagaacattgcagatattggaaggcagcccgtccccatacggctggtacggctgccgggcaaactgcttgttgtcccagtaccacggcgcctgcacgttcttccactgcatgtaccccgacttgcgcggtgaatacgagataccgccgcaggcataggccagccacagattccccctggcgtcaaagccggcggaagccgcctggtcttccaccagtcccgtagaccggtccagcgccttccatgaatcatttccgggatcataaacggacacgcctccggacgtggcaacggccacctccccggaaacgggagagacggccagcgcataaacatgctctccgttcagggcattgccgcggtcatacgtcttccactccctcccgttgaaaacggccacgccgctgtcgtccgtgcccacccagatgcggccctgcctgtcctccgcaatgcaggtgaaattcttccctttgggaaagccggaataataatccatgttgagccacgacttctcgtacgctctgtcgccgacttgaaggcggtaaacgctttccctctcccccacggcccatatagctccatcctgcgccaccagagtaccgcggataaagcgcaccgggcattccggcagttgttccgggatctggacggatttgacttctcctgcggaccatccccccagcagggggaaaaccaatgcgagtgttcctatgaaatgtttgaatttaattaacataaccaattatttcctgattattatgtgagaatattatcgtattttgccgacgtcaaccccatttccaagttattctcaattttatccaatcaaaaaaccacacaatcggtttacagtcaaatatataagtcattcaatatatgttagttataaaaattattcaggtttagaaaaacccaagacacaccgcccttcctgtacccggacagaaaaaatgcaggagactaactcaaaagcggcgaccaaccgctttttcttctttcaaaaatgctctttccggacattcatcaacatcgaattccgaatccgttgcaatgccttgaacacatgaatatcaagactgtcagatagttatcatttaattcattttttcattaattgctatttctccaatttttccaaatccaaattcttctaacatgttttaaaccaaactttcctgttgacttcggattcggaatccgataagaaccgggtatcgcaggggtttctttctctcctgaattttgaatggaataatttaaattactatagtattaatttcatgcaacctcatttgccttatcaactaacagcgtggcttatggcagccgccttcttcggaactctcgcctcccaatcccaggctgccggagaaagcatcagcatcaattttggtaccaacgaaccaaacggcaccatttccgattcttccagcgccgggcttgaagccgttcccggctccaactggaatcaattcagcggagcttcccaatccacggcccagaacctgaaggataacaacggagacgccaccggagcgaccgtcacctggtccagtaaaaatacctggcgcggaggcgacaccccctccaccggggacggccagatgctgaagggctacctggacgacggcagcggcatcaccatcaatgtcagcggcgttgatttcctgacctacggcgtctacatttattgcaatacggacacagccaacggaaacttctccgccaagaccgtcaacggcgtttcctacacctggaacggaacttccaccgtggcaggctctgccgcgtggggagcaacgggaacctttggacaggcggtggaagggaccaatacgctgtatgtggaaggccagacttcacccaacctgagcatcaccgctccgagcaacaccagcggttcaggcacccgcggctgcattgcaggcatccagatcgtcaatacctatgagggcgttaaaatttccgctacgctggatggcacctcctcctctgagtggacttcctcccaactgggggatgccgcatggacggactccgctgacggagccggcacctatgcttccatcaacgtcaccaacggcccgggagccctgactattgcggacggggaaacgcgccatacggacgccatcctactcaccggcggaaacctcaccatttccggcggcaccctgagcctgtcgggccccggcatcctccgcgcggcagaaggcaccacgctcaccgtatcctccagcctgtccggaacggctactctggacggggccggcaccgtcatcatgaacggaaccagcaccctgacgggcctggccggttccggagccctgactctgggggacaacgcctccatttccatcacgggagataccgcctcccgctatacgggagccctgactctgggagaaaacgcctccctcacggcagccaatcccaactggaccttcgccggagccctgaccatagcggcggccaactacaatgccaacgactcatgggcgcacaccgcctcctccctcaccctgacgggagccggagacgtggaatacacctttgaagggggaacgcttattcccatcacccatgcagacagcaccctgacggtccgcaaggtgacggacggcaccggcaccatcaatgccaaccatgcctccgacatcgcacacctgatcattgacgccggcacagtcaacctgtccggcagcgacaccgcctacacgtttgaatccatcaccatcggccagaactccaagctgagcctgaatggcgtaggcatcgtactgggcggcacgccggatatcctgatgaagtccggctccacatttgaaatgctcaactgccgcgcgtatggcgcggatacccccatcagcgccaacattaccgttgacgccgccggagccggcgtgaccatctccggctccctttacggaaacgccaccaaccttggcggaacgatcaccggcgaaggagaactgctggtcaccaacggttccagcggaagcaacaacttcaccatttcctccgtcatttccgacaaggacgcctcccaccagatgagcgtgaaggtgaacaagaacagctccgtagtcgttttctccggcaacaacacgtacaccggcggcaccaccatcgtgcagggaacgctccagaccaactccgcaaccgcacttggccagggttccgttctggtgcagggaggaacgctcaacgccaacagccaggccctggccaacgccattacgctccagacgggcaccatccagaacctcggcagcgcttccgctcccaaggacctcaccgtcagcctgacggggaacgccgccatcaacaactcaacggtaatcctgggcaacgcttccggcgcgcccatgatttccacaggccaggtgctgacgctttccggcactacctcagccacgctgaacaacgccacgctgaacctctccagcttcaacacggctctgatcgacatgcagggaacgtccaccctgaacctgaccggcggcctgacgctgaatctggacagtgccctggcgcttgaccttacctccctgacgatcgacctgatcactgtgggcgaaggcacatccctggcggacaacatcgactgggattccctgctgacgcttacgcagaacggccagaacctgatctgggacggcgttacctacaacaacggcagcctgaccttcaccggcctggccgtaccggaacccggcacggccaccctgagcctgctgggcctcacggccctgctgatgcgccgcagaaagaaggcctgagcttcctgaattaacagaagactccattcaggggctgttccgccagcaaggtgcggaacagcccctgtttgctatatatccaactctaaaaaacaagggccgctgccatacggaaacccttgtttgaagtcttatccctttccggataaggaataaaacctccgcatcatactgccggaatgccggtcatattttcttaactaaagtaaaagtagggtcttcatcctttccgctggtcccgaaatcacttttattctccattttagtcaccttgtgcagggccgtgatatagacttgtgaataaagggttcccgatgttccaaatttattgggatcataggcgaaggggacatcattcttcgtatcggcgaatatcagcgctacatatatatttccagtcatggatatccgtacttcatgtatttttttgtacagccattcctgtttttcctgaggatttttattgaggcttgtgatcaccgtcactttacccggcataatattgtaggcattttttacacccttttttgcttccactcctttttggggaagcgccggcttattaataatggaaaccccatcataattcagatgagttcctgaccacatggtatgctccccggtaatctctccgttgagcacgttcatgctcaacagactgattcccgcagccaatatcattttattattcatgttgtcgttttcttttgggattcatgttcaaggtgtttcttcatctcttgaactgatttcacaggaggttgttcggcatcatctcgatattgcctccaatcaatatccagcttatccatcaaataaacttcatttacggaaaaaggtatcgtgcccggggcattcggaacacattccctggatctgagatccggataataaatctgacactggtcccacgcagccgccatggtctggtcaaaagaagaacgtacatctggagagtaaattctggcttcccattgaaaccagtcttccaagcacctgctctttttctttccttcaaccgcctcacggaatgaggaaagaatgtacctgttcaagcaggaagatcctgcgggcgtaacataccgtggctgatactggagagtgagcagttgattgagaagaaccttctcctccggcccggcaacagaagaatgaactctctcgggggaaggaataatgcctgcaaataatccatcaacataataaggcaattcatcaggcgttctcatttccagaggaagaagcgcattgatgaataccccatttaaaatagtattgaaggaaccgttcctgcaaacatggaacaagtatacgccgcctttcctgcacatgaagcgcttgtaaactccggaccccgcaaacctggaaacgcgcgtgcgcgcttccaccgggaacgactgccactgctccatagaagcggcaagcgtcttcccttttttagtgcggttcccaatttcaatatccgctttgttgtcgaacaggctttgaatggaagaagaaaaaggatgcctccgggcttctaccacataatcccgcctggattcatgttgaagatatccgttgggattatagaaatacagggctatttcatgaaccccttccggcacttccacagctacccatataccgggaccgtccacaaaggacggatatacttccccgtggtcgtcccattccgcctctgttcttgtggaatcactggggtcaaagagaacattgcggtttcctgccacattggcgctttgtacccaccagcgcaatccatctccctgattgcggttgagccccatcagtccctgaatccaataacagggatacactcgtttccatttagggtcttcagcgctcgtttccatgcggacaggtaattgcttggctttaaactcggaattgttcatgggggcattcatggcgcacagcgtggcgcgcgtcaggccgtacctcccgcaccagtcccccttcgtggaccagtcctccccgcggaacacaatgctcttccccgcatgcgcatccgctcccagcttttccagcctcttcaggactgcggcagggtcttccatccgggccggggacgggaacggaatctcatcgtcctgctgcttcctgtccagttgataagacagggaaccctttttcagactgacaagccctttcccatacgtcgccgcccagacacttccgtccttcagcgccagcagggaggggacatccgtattttccagtcccttcctgattctccggcgcaccgtcatcctttcagcatccagcacgtccaccccctgcgtccggtagccgatgaaaatatcctttccctgccggaggatggaagacacgaagtcttccgacagcattttggcatttccctcacccggaacggccgtcttccgcgcagcggaaccatacagattactattcttctgggcataatcccggccgcgcaagaaacgccaggagctgatgccgttgctgtacaccaggccggaccaggtgcctaccagtacctggtctttttccgtacaggccagaacattgcagatattggaaggcagcccgtccccatacggctggtacggctgccgggcaaactgcttgctgtcccagtaccacggcgcctgcacgttcttccactgcatgtaccccgacttgcgcggtgaatacgagataccgccgcaggcataggccagccacagattccccctggcgtcaaagccggcggaagccgcctggtcttccaccagtcccgtagaccggtccagcgccttccatgaatcattcccgggatcataaacggacacgcctccggacgtggcaacggccacctctccggaaacgggagagacggccagcgcataaacatgctctccgttcagggcattgccgcggtcatacgtcttccactccctcccgttgaaaacggccacgccgctgtcgtccgtgcccacccagatgcggccctgcctgtcctccgcaatgcaggtgaaattctttcctttgggaaagccggaataataatccatgttgagccacgacttctcgtatgccctgtcgccgacttgaaggcggtaaacgctttccctctcccccacggcccatatagctccatcctgcgccaccagggtaccgcggataaagcgcaccgggcattccggcagttgttccggcacttggacaaaggcaattcccccctcagtccacatccccataacaatcagcagcatagcggcagcactgcataaatttccgaatatgacactcattatccttttatgatattttctgtataattgatgcatcattcaaagtcaaccaaatggaaagttattttttaatatcggatttcagaaaattacttcattcctgctttcagggccaatctgctaccttgaaaaggtcagcggacgctccggcaatgagaccaataagacttcaaagaacaaaaaaagggcctccgcacccgcggaggcccccagcttacccaaacaacagaaaactgctgcatgcttctttcaggaatgcatggccagggcatgccggtattccaccgggaagaccttgatgaatttgccgcgttcctccggccagttgtttaacaggtcgcaggcccggcggcttttcgtagccatgtagtgctcgtaaatgagctggagcagttccgcctcgtcggcggagtgcggcatgaccgtttccaggtccacgctgcccaggttgcatttctgatcgaagtcgttgtccgcatcgtacacgtaggccagtccgccggtcattcccgcggcgaagttgacgcccaccttgccgagcaccgccacacggcccccggtcatgtattcgcagccgtggtcgccgatgccttccaccaccatcttggctccgctgttgcggatggcgaaacgctccccggcctgcccgtgcaggaagatgctgccggacgtggccccgtagccgatgacgttgccggcaatgacgttgtccgacggagcgtaggagatgttttccggaggcctcacgatgattttgcccccggaaagccccttccctacgaagtcgttcgcctccccggcgagttcaaaggtgatgcccggcgccagaaaggccccgaagctctgccccgcgcatccggtgaagtgcaccgtgagcgtatcctccgccaggccgcgcgggccgaatttcatcaccagctctccggatagctccgtgcccaccgtccggtccacattgcggacgtcgcggaagagttcggtcttttcccctttttccagcaggcccttcaagtccgggagcaggcggcgccggtcgtagttgtccagaggttccttttcaaaggaggggtcaaatctgcgtccgtccccctccgccgcatgcaggatggaggagaagtccagatgctgagccttgtagaagtcaatggcgcggttcacggagagcaggtccgccctgccgacggcttcgtccagggagcggaggcccagggaagccaggatttcccgcgtttcctgcgccacgaagcgaaggtagttgatgacgtattccggcttgccgctgaacttggctctcagggccgggttctgcgtggcgacgcccaccgggcacgtgttttcatggcacctgcggagcatggcgcagccgatggcgaccagaacggcagtgccgaagccgaattcctccgctcccagcagggccgccatgacgacgtccctcccggtgcgcagctggccgtccacctggagccggacgcgggagcggagcttgttgagcacaagcgtctgctgcgtttccgccagacccagttcccacggcagtccggcgtgcttgacgctggtgagcggggaggcgcccgtacccccgtcgtggccgctgaccacaaccacgtccgcgtgggccttcaccactccggcggccaccgcgccgatgcccacctcggagacgagcttgacggagacgcgggcgtccgggttggagttccgcaggtcgtagatcaattgggccaggtcttcaatggagtagatgtcatggtgcggcgggggagagatgaggctgacgttcggcatggaatggcgcagccgggcgatgtacgggtccaccttgtgcgccgggagctggccgccctctccgggcttggcgccctgggccatcttgatctggagctcggaggcgtggcgcagatagttgatggtcacgccgaagcgtccgctcgccacctgcttgatcgcgctgtagcgcacctcgcccctggcgttgggttcgtagcgggcttcatcctcgcccccttcaccggagttgcttttggctcctattttattcatcgcgatggcgatggtttcatgggcctccgggctgagggaacccagggacatggccccggagacgaagcggcgcaggatggaatccgcgctttccacttcctccagcgggacggtgtccgcgggagcgaattcaaacaggccgcgcagggtgcagaggtgctgcgcctggtggttgctgtagtccgcaaattcccggtatttccgttcgtcattgtcgcgaacggcggcacggaaggcctggagcgtctgcgggttccagaggtggttttctccgcccttcctgtacttgtactggccgcccgcattcagcccgccttccttcccggcgttttgcgcggcgcgctggttgcattccgcagctatttcctccagcccgatgccgcccacgcggctgacggtgccggggaagaattcgtcaatcagttcccggttcagccccacggcctcgaacaattgggaggagcggtagctacgcagggtggaaatgcccatcttggacatgattttaagcagccccttgtcaatggcgttgatgtagttgccggaggccttcaccacgtccagcgggcagtcctgcggcgcggccagggaggtgaccgtcgccagagccaggtacggattgaccgccgtggccccgaaacccagcaacagggcgaagtgcatcgtttcccgcgcttcccccgtttccaggatcaggcccacgtcggaacgcagtccggcggccgccagggcgcggtgcaccacggagcaggccagcaggctgggaacgggaaggtagccgcggcctatgttgcggtccgtcagcaccaggatgcgcacgccggacctgaccagccccacggcggattccgccaggctgtccagcgtctcccgcagagcgtttccgtccccgccttccgggaactggagggggagcctggcggaagggaagccggcttcccggatgttgcagaggcggttgagctcctcgtccgtaatgacggggcgcgccatcttgatgagccgggcgtgctccggcgtttcctccagaatgttgggatggttgccgatgtacgtggtcaggctcatgacgagttcctcccggatggggtcgatgggcgggttggtcacctgcgcgaacaattgcttgaagtagttgaacaggagcggcgcctttccggagaggacggccagcggcgcgtcgttccccatggagccgaggggttccgcgcccttcatcatcatcgggcggaggatgagttccacatcctcctgcgtgaagccgaactggcgctgatgaaccgccaggtccggcatttccgcggaggcggagacagagtcgaacagggagcggacggaaatcttgttttgttccacccagcggcggtagggcatgcgccgggccatttcattcttggtttccgcatcggacaccaggcggtggttcaccaagtcgcagtagatcatctctccggggcgcaggcggcccttgcgggccactttttccgcgggaatgtccgctacgcccgtttccgaggccaggatgaaaatatcgtccgtggtcagcgtgtagcgggcggggcgcaagccgttgcggtccagcatggcgcccgcgttgacgccgtcggagaagacgacggcggtcgggccgtcccacggctccatcagggcggaatggtattcaaagaagccacgcacgtccggccccagatggtagttgacgccccaggcctgcggcatgagcatgagcatggcgtggcgcaggtcgcgcccggcggcggcgagcagttccaccatgttgtccaggcaggcggaatcgctctggccgggaggaatgaggggcaggagcttctgcaagtcatcccccagcagggcggaggacaggtgcggctcccgcacgctcagatggttcaggtttccgcgcagggtgttgatttccccgttgtgggccaggtagcggaagggatgggccaggctccacgtggggaaggtgttcgtgctgtagcgctggtggacgagggccagcggagatttgaaacgctcatggcgcaggtcttcgtaaaatccgtcaatttgcgtgccgaggaacaatcccttatacacgatgctgcggctggaacaactgcacacgtagcatccttccacgcgccgctccatttcccggcgcattacgaagagcttgcgttccagtgccgcctggtccgcaaagccgctgccgtcgatgaagagctggcgaatcagggggcaggtgcgccgggcgttctcgccgatgctgtcgcggtccacgggaacctctctccaggcaatcaccctgccgccgttttccgtgacggcggcctccagttcctcttcatggccgcagccgccgaacatcatggcgactccgtattttcctctggcggggagtttgttgggaaggagcaggcggaagaattcatccggcagggccagcaggatgcccgctccgtccccggtatcgggatcgcttcccacggcgccgcggtgcatcagcctcttgagaacggtgacacccatttcaatgattttgtggctcggttcattcttcaggtccgccaccagccccacgccgcaggcgtccctctcctgttcaaagtcatacaatccctgcggcgcaggaatgcctgtctcgaattgatcactattcatcagtttgctgttttatttgagttaagctgattttcttatagcaaaaaccgtgccaacattatgcactccttccactctccccgttttccgaacgccgccgccccggttttacatgatttgacaggccttccggcatgacagaggacccacggcggcaaaggacaattccctctcccaagcagatatttttacattttcgtaattacccttttaccgtgattttacatttttgtaattaatgctttcacctttttcatccctcttctttccacggcttccttttacaatttctgcaatatatttataggcaacttcttaaaacaccatacccactccggcacaagttgattcaaaaagctggcacggttcttgctaagaaaaagatacaacagttaaccatgatgagtgactcgacaagaacacaagccatcagcgccatcgcctcccttcccgtgagcggggtgagcgagagcgctcctgtccgcattgattattacggcgccgacgttttcagtacggaggtgatgaagaagtacctgcccaaggacacggcgaaaaccctcctgtccaccatccaggacggcctgccgctgaacgcggacattgccgcggacgtagcccacgccatgaagcagtgggctctggaacggggagccactcactacacgcactggttccagcccatgacgggttccacggcggagaagcatgattccttcctggaccccaagggcatggagccgatcatgagcttttccggcaagaacctgatcgtgagcgagccggatgcttccagcttcccctccggcggcctgcgctgcacgtttgaggcccgcggatacaccgcgtgggaccccaccagccccgccttcatcaagaggcacgggaacggagccaccctctgcattcccaccgcctattgttcctatacgggagacgcgctggacaagaaaacccctctgctccgctcccggcaggcattgggcaacgccgtcaagaggctgatgaagtgcttcgggctgccggatgaacgcgtgaccatcacgctggggccggaacaggagtatttcctgatcgacaagaatttctatctgaaccgcccggacctggtccagacgggccgcacccttttcggcgcgccgcccgccaagcaccagcagctggaagaccattatttcggctccatcaagccgcgcatcctcaatttcatgaatgatgtggaaaaggaactctggcggctgggcattccggccaagacgcgccacaatgaggtggccccggcccagtttgaactggcccccctgtttgaggacgtgaacctggcgatcgaccacaatatgctggtgatggaaatcctgcgccagcaggccagcaggcacgggctggtgtgcctgctccacgagaagcccttcgtgggcgtcaacggctccggcaagcacaacaactggtccatttcctacggggacaagaatctgctggatcccggcacggacccgcagcagaacgccattttcctgaccgtgctggccgccatcatcgaggctgtggacaagcacagcgacctgctgcgcaattccgtagccagcgccgggaacgaccaccgcctgggcgcgaacgaggcccctcccgccattatctccattttcctgggcgaccagctcaatgaagtgatcgagaatatcatcaacggggaatccggccgcggcaggcgcaacgacacgctccagatcggcgtggatacgctgcccgtccttccccgggacgcgacggaccgcaaccgcaccagcccgttcgccttcaccggcaacaagttcgagttccgcgcccccggctccgcccagtcctgcgcgggccccatgatgaccctgaacaccattgtggcggaggccttcgattccctggcggaggagctttcctccttcgctccggagaccttcctggcccagctccaggagacgctcaagcgcaggatttccgaacacaagagaatcatcttcaacggagacaattattcggaggaatgggtgaaggaagcggaacgccgcggccttcccaacctgaaaaacacgatgaccgccctccacaccctggtgaatgagaagaatgtggccctgttcgagaagtacggggtgttctcccgcagggaactggaatcccggtttgagattttcctggaggaataccacaggcgcatccgcattgaagggcgcctgtcctgggaaatggcggccaccatcatcctccctgccctgcgcaacgaatacaagcaaaccgtttccgcgctctccagggcgctggacgccaagcggaccaacgggaccgccgccctgcaaaagctggcggacaagctgggcgacgccctggattccgtcgtgtccgacctggataccctggaaaccgcgctcacgagctgccatgaggacatccttgccgcgatgtcccgattgagaaccagcgtcgatgccgcagaaaccctggtgaacgaccggtcctggcctctccccaagtaccgggaaatgctgttcatctattagggtgcaccgacgagctccggagctttgccggcccccttgcggggcaagcctctgcccgcagagggaaaggcacggctccggggccttggcgcgccctgtcccggccgccctttttcccactgttttccaccgaccaccaaccccagaaaaatccgcgtcattggccgtaaaaaaactttcctccggagccctgcgggcacttaattcccccggcggaaatccacggtccagaaccacaggattcttccatcgccattatgcctaaagatacctccatcaaaaagattctcgtgatcggctccggcccgatcgtcatcggccagggctgcgaattcgactactccggcacccaggcctgcaaggccctccgggaagaaggttatgaagtagtgctggtaaactccaatcccgccaccatcatgacggacccggagaccgccccgcgcacctacgttgaaccgatcaccccggagttcgtggagaaaatcatcatccgggaaaagccggacgccctgctccccaccctgggcggccagacggccctgaactgcgccatggagctccaccgcagcggcgtgctggagagggagaacgtgcgcatgatcggcgcccatgcggacgccattgaccgcggggaggaccgcaacctgttcaaggaggccatgatccgcatcggcctggacgtgccgcgctccggcatcgcccacacgatggaggaggcgcgccgggtagccggggacataggcacctttcccctgattatccgccccgccttcacgctgggcggcatgggcggcggcgtggcgtacaacaagacggagtttgaggaaatctgcgcccgcgggctggacctctcccccgtttccgaaatcctgattgaggaatccctcatcggctggaaggagtttgaaatggaagtgatgagagaccgcgcggacaattgcgtggtgatctgctccattgagaacattgacgcgatgggcgtgcataccggggattccatcaccgtggctcccatccagaccctgacggacagggaataccaggtcatgagggacgcatccttcgccgtcatccgggaaatcggcgtggaaacgggcggttccaacatccagttcgccatcaacccggccaacggccgcatgatcgtcattgagatgaacccccgcgtttcacgttcctccgctctggcttccaaggccacggggttccccatcgccaagctggccgccaagctggccgtgggctacacgctggacgaactgcgcaacgacatcacgagggaaacgcccgcctgctttgagcccaccattgactacgtggtgaccaaggtcccccgcttcacgtttgaaaagttcaagcaggcggacgagcacctgaccacctccatgaaatccgtgggggaagccatggccataggccgcacgttcaaggaatccctgcaaaaggccctgcgctccctggaaacgggccgctggggctggggtttcgacacgaaggcgccgcagaagcccaccgcggaggaaatcacgcggaagcttgccgtccccacggcggaacgcattttctggattcagacggcgttcagcagcggcttttccctggacgaggtgcaccagctcacccagattgacccctggttcctggcccagatgcgggacctggcgaaggcgggcgaccgcctggacgcgctggacctgcgggaagccaagaagctgggcttttccgacaggcagatcgccctggcccgcggaactacggaggaaagcatccgcaaggaacgccgcgaacagggcatcgtgcccggctaccgcctggtggacacctgcgccgcggagtttgaggcatacacgccttacttttattccacgtacggggatgaaaacgaggcgcgcgacacgggccggaagaagatcctcatcctgggaggcggcccgaaccgcatcggccagggcatcgagttcgactactgctgcgtgcacgcctccatggccctgcgggaaatggggtatgaaaccatcatcgtgaattccaaccctgagaccgtctccacggactacgattcctccgacaagcttttctttgaacccctgacgctggaagacgtgctccacatctgcgagcaggagaagccggacggcgtcatcgtccagttcggcggccagacgccgctgaacctggccaacgccctggaagcccacggcgtgcccgtcatcggcaccagcccgaaggccattgacctggcagaggaccgcgaacatttctccgccctgctgagggagctggggctgaagcaggcggacgcggggacggccaccaacgtggaggacgccgccgccattgccgcccgcatcggctatccggtgctgctgcgcccctccttcgtgctgggcggccgcggcatgatcatcgtgtacgaggagcaggagctgcgccggtacatgaacgaagccgtggaggcctccgaggaacgccccgtgctgatcgaccgctttctggaaaacgccgtggagattgacgtggacgtcatcgcggaccgggagcgggccgtcatcggcgccatcatgcagcacgtggagcccgcgggcatccactccggggattccgccagcatgattcccgccatgggcatttccatgaaaatgcacaaggaaatcacgcgcgcctccaaggagctggcacggcggctgaacgtctgcgggctgatgaacatccagttcgccgtgaaggacgaacagctttacgtcattgaagtgaatccgcgcgcctcccgcaccgttccgttcgtctccaaggccatcggcaggcccctcgccaagctggccgcgcaggtcatggccggcaagacgctggaggagctgggctttacccgggaaatcacgccggaataccactgcgtgaaggaggccgtcttcccctggggccgctttccgggcatcgacgtggtgctggggccggagatgaaatccaccggggaggtgatgggcatcgacccggacccggacatcgccttcgccaaatcccagatcagcgcattcaatcccctgccgacggaaggcaaggttttcatctccgtgaatgaccgggacaaggagcgcgtgctccacatggcccgccagctggcggacatgggcttcacgctgtgcgccacgcgcggcacgatgatccacctgctccagcacgacatcgaatgcgaacgcgcgtacaaggtgaacgaggcgcgccgcccgaacatcgtggaccacatcaagaacggggacatcgatttcatcatcaacacgcccggctcccacgacgcgcgggcggacgacatcatcatccgttcctccgccatcgccgccaaaacctcctactgcacgaacctggcctccgcacaggcctgcgtgaacgccattgaggcgctgaagaacaggaacctccaggtgtgcaccatccaggaataccatgcccagaccgtttaaccccataccaaacagcatttttatatcatcatgagagccattctcgcactggaagacggaagcgtcttcatcggttcgcacttcggagctacgggcacggaagtgggggaagcctgcttcaacacgtccatgaccggctaccaggaagtcctgacggacccgtcctacagcggccagattgtcacgatgacctatcccctgatcggcaattacggcgtcaacccggaagattacgagtccggcaaggcgcaggtcagcggcttcgtggtggcggagctggcgaaggttccttccaactggcgcgccacggaagccctgggcccgtggctggaaaagcagggcgtgatcggcattgagggggtggacacccgcaagatcgccaagcacctgcgctccgcgggcgccatgcgcgcctgcctcaccacggagctgacgccggaggaagccgtggaagccgccagaaaggccccctccatggaaggctgcaacatcgtagacaagatcggctcccatcccatgaccccggaggaagtggacgcgctggtgacggaaggggtactgccccccacggagtacgacatcgtggccttcgacttcggcatcaagtacaacatcctgcgccaactgagggaaaacggcttccgtgtgaccgtggttcccgcccacacgacggcggaggaagtgcttggcatgaagccggacggcgtttttctttccaacggtccgggggaccccgccacgctgacggacatccaccgtgaagtagccgccctgatcgggaaggttcccatgttcggcatctgccttgggcaccagatcatttcccacgcgctgggggcgaagaccttcaagctgaagttcggccaccgcggcgccaaccatccggtgaaggacctccgcacgggtaaaatcagcatcacgtcccagaaccacggttttgccgtggatccggacaccgtgccggacgacgtggaaatcacgctgatgaacctgaatgacaataccgtggagggcatcgcccacaaaacgctccccgttttcagcgtgcagtaccacccggaagccgcccccggccccagagacccccagtacctgttccgggacttcaagcagatgattgcggccagcaaacggcaaaccgcccgctgacagtggcattcctcttccatgaccagagcattttcctcgtcaccatgggaaaaatgcgctatttatgcccgggcacatgaattgcggctccggcggaggtttttcctttcattcatcaacctccccaaccaacaaaccatctacacacagcacatgagcaaaatcgcattaatctccggcatcacgggacaggacggttcttttctcgcagagttcctgattgacaagggctatgaagtacacggcatcctgcgccgctcctcttccttcaacacgggccgcatcgagcatctttacctggacgagtgggtgcgggacatgaagaaaaaccggctgatcaacctccactatggcgacatgacggattccagctctctgatccgcatcatccagaccgtgcagccggatgaaatctacaacctggcggcccagagccatgtgaaggtcagctttgacgtgccggaatacacggcggaaacggacgccgtgggcaccctccgcatgctggaggccgtccgcatcctgggcatggaaaagaaatgccgcatttaccaggcttccacgtccgaactcttcgggctggtgcaggaagttccccagaaggaaaccacgccgttctatccccgctccccctacggcgtagccaagcaatacggcttctggatcaccaagaattaccgcgaatcctacggcatgttcgccgtcaacggcatcctgttcaaccacgagagcgaacgccgcggggaaaacttcgtcacccgcaagatcacgctggcggcggcccgcatcgcccagggcatgcaggacaagctttatctgggcaacctgaacgccctgcgcgactggggctacgcgaaggattacgtggaatgcatgtggctgattctccagcacgacaagccggaagacttcgtcatcgccaccggggagatgcatacggtccgggagttctgcacgctggccttccgtgaagccggaattgagctggaatgggaaggcgaaggcgtggaagaacgcgggcgcgacaagaagacgggccatatcctggtggaagtggatcccaagtacttccgcccctccgaggtggaacaactgctgggagaccccaccaaggccagaaccctcctcggctggaaccccacctccaccccgtttgaggaactcgtgcgcatcatggtccgccacgacatggaatacgtcaaaaatcccgtcaattcctgagatggaaaaaaacagcagaatattcgtggccggacaccgcggcctcgtgggctccgccatctggaaatccctggaagacaggggttattctaacctgatcgggcggacgcaccgggaactggacctggaggacccggcggccgtgcgggaattctttgaccgggaaaagccggaatacgtctttctggcggcggcgttcgtgggcggcatcatcgccaactcacggtaccgggcggactttatcttccgcaacctccagatccagcagaacgtcatcggggaaagtttccggcacggcgtctccaagctcctcttcctggggagcacctgcatctatccgcgagaggcaccccagcccatgaaggagagcgccctgctcacctccccgctggaatacaccaacgagccctacgccatcgccaaaatcgcaggcctgaaaatgtgcgagagcttcaacctccagtacggcaccaactacatcgccgtgatgcctacgaacctgtacggccccaatgacaacttccacctggagaacagccacgtgctgcccgccatggtgcgcaagattcacctggccaagcgcctgatggaaggggactgggacgccgtgcggaaagacctggacgcgcggcctgtggaacaggtggacgggacggcgccggaagaagccatcctggacgcgctggccaaatacggcatcacccccggttccgtggaactgtggggaacgggcacgcccctgcgcgaattcctgtggagcgaagacatggcggacgcctgcgtccacgtgatggaacaggtggatttcagccagctgaaaggggaagaccgggaggtgcggaactgccatatcaacatcggcaccggaaaggaaatctccatcggcgatctggcgcgcctgatagccgccacggaaggctaccggggagaactggtattcaacgcggacaagccggacggcaccatgcgcaagctgacggacgtttccaagctgcattccctgggctggacccaccgggtggagctggaagaaggcgtggagcgcatctaccggtggtatctgggccaggcggaagccgccggaaactaagccgcccagcatctccggcagcacgcactccccatgacccattttccagacagccaggatacggcgcccgtcaaacccagcctgtgggcgctgagccccctgctggttttcttcctgctttacctggtcatctccgtagccgtacaggatttttacgccgttccggtgacggtggcctttacggcggcggcagtctgggccgtgctcatcacccgcgggaaaagcatggcggaacgggtggacctgttttcctccggcgtagccaaccggaatatcctgatgatgatctggattttcgtgctggcgggcgcattcgcccagtccgccagggacatgggggcaattgacgccaccgtgcagctcacgctgcgcctcctgccggacaatctgctgcttgccagcgtcttcatcgcatcctgcttcatctccctttctgtgggcacttccgtgggcaccattgtggcgcttgctcccgtagccacggggctggcgcacgccacgcaggtcagcaccggcatgatgacggccattgtggtgggcggagcgttttttggagacaacctttccttcatttcagacaccacgatcgccgccacccgcacgcagggctgcgccatgcgggacaaattccgggctaacgtgaaggtggtgcttcccgccgcgctgctggccctggcctgctacaccctgctcggatggaacgtgcagtccccctccatggcggacgctcccattgaatggatgaaggtgttcccctacctgctggttctggtgacggcgctggccggagtccacgtgatggccgttctgacgctggggctgctcgccacgggacttgtcggagtaggcatggggtatttttccttcatggcctggttccgcgccatgggcagcggcatgaccggcatgggggagctgatcatcgtcaccctgctggccggcggcgtgctggcgttgatccgcttcaacggcggcattgcgtacatcatcggaaaaatcacggcccacatccggagcaggcgcggcgcggaattcagcatcgccggcctggtctccctggccaatctctgcaccgccaacaacacgatcgccatcattacggtgggtcccatcgcgaaggagatcagcgataaattccatatcgcgcccaggcgcagcgccagtattctggacaccttttcctgcctggtccagggcgtcattccctacggggcccagatgctcatggccgccggaatcgcccaggtttcccccctgctgatcatggaatacctgtattaccccctgattctgggcgtctgttccattcttgccatcgcactggctcccggaaaaacgggaaagcgcaggaaaagctgagaagccataaggaagaagaggcgtcaaagacgccctttttgttaccgacatgttatccttgttatcctcatgttactcaacatatggggctcctatgttatcatacatgcatgagccttcatatagaacccacagaagacgcagtggaaaccctgcgcaaggaaaggcggaaaaattacattgccgcattggcgacatccattctctccgtcgtcctggcgggagccattctctactccctgaccatcatcatcgcccccccggaagaacccaaggtcgtcggctacatcacgccggacgaagctcctccgtcggatacgcctccgccgccggaagtgcagagggaaacctcctcttcctcccatgcggaaactcccgtcaaagtcgtggtagccgcggcggcagccccggtcagcctccccaagatcgacattgacccgccggacgaacccgtcatgctggaagaaggaaccgccctgggcatgggagacggcttcggccccgacctgggtgacgccacctccgccttcggcacgtcccagccctccggaagtacgctggtaggcaccttttacgataccaagcagacgcccggcggacggcccaccaacatgacgatggaccagtaccgcgcctttctttcccgctttgtcaacaaaggctggaatgagtcggagctgaatcgtttttacaaggcgccgcagcaattgtacgccgcccagttctacattcccagaactcccgccaaagacgcgcccaaggcctacggatgcgacgacaaggtgaaacccagccagtggcttgccatttaccggggcaaagtgcgcgctcccaaatccggcacgttccgcttcgtggggctgggagacgactacctggtagtgcggttcaacaaccagaacgtattcgactacggctgggaatccgcctccctggggaaaatgacggcgaacaacgccaaatggcttgatgccatggaaggcaagcccggcaacgacgacctgaagaaggaactcaaggacgcgggcatcaacgtcccccccgtcacgttctacaaatacggcccctccggccactggaacaacaccatgcgcggcgtagccgccggcaagcagttcacggtggagcaaggcaaggtgtaccccattgaaatcctggtcagcgaaggtcccggcggcgaattcggcatgaccctgctgctggaggaagtgggaatggcacccatgagcaaggatcccaagacgggagcgcccatcctgcccctgttccggaccaactacggtgtaccgaaaccggacaagaacaaggaatatgtgccgtttgatgagatcggcatcgtatgggaatccatcaaataaccggaaacttcccgatttccctctcttcatgcccgcaggcctcctgcgggcattttacttgcccggccgtaaaagatggcctacgctcccgttattacgatgcagccttttcgattccattccatctatcagccgcgcatctggggcggccagcacatgagaaccatgctgggccgggaactgcccaaccgggaaacggcctacggggaagcctgggaaatcagcgaccgtccggaagccatgagcacggtgagggaaggcgaatgggaaggaatgcccctgcaccagctatgggaagaacggcgggaagaactcttcgggcccggctacgaacgttttccgcgttttcccctgctctgcaaaattctggacgcccgtgagaatctttccgtccaggtgcatcccccggaatgcacggcggcagcacggcggggagaggttaaaaacgaggtatggtacgtgctgcacgcggacccggatgccctgatttacggaggaatggaagaaaccgctacgctctcggacatccgccgggcggcggaaacgggccaaatggagcaactgatacgctccacccatctggaaaagggggaacatctttacattcccgccggcctggttcacgccatcggcgccgggcacctcattgcggagatccagcagaacagcgacaccacctaccgcctttacgactggaaccggacagacgcttccggacagggacgggaactgcacatggaacaggcgctggattccatcgcggaattccgggagctctgccggcagcccggctacctgacggaaatgccgcatttcaccacggaggaatatcggctggaccagggagaacgattcacccagccggacgcctcccgcttcgccatcttcacagttctccgcggctccgtgtcctgggacgggaaaacggcgcggcagggggaattcatcctgtctccggcaaatgcggacgccgtcaccgccgtggaaccggataccgttttgctctcaacaacggtttgaacggcccaatatgacaaaaagcgtgaagaattcggcacaaagctaaagctttcacactttttcgttgcaaagaagaaaggtgaatcttagcgtgaactaaacttttcccgcatccgtgctgtaaatccctcacctcccggccgccgtatgagcaatatttccaccatcgccacttatcttgcccgtgtttccggacagctccagcccatgctggagaaagtccagggcatggaccgcagaaccttcctgctggaagccgccgccctgctggccctgaccagttgttcggaaccctccggcaaagccggaatggcgcccatgatttccttcaagccctccggtgtccccgtggtgaagcgctctccacggcagctgctggcggaatgcaacgtccggcctatgttcatgccccgctcttcccctctccggcagcgctcttcccggatgaagccgcgcttcatcaccatgcacaacacggaaaacccttccgcagacgccatgcagcacgcgcgcgcgctgaataacggagccctgcgctgcaactggcactacacggtggatccgtatgtagccatgcagcatatccccctgaatgaaacgggacgccatgcggaccggggcggccccggggacatgtattccatcggcattgaaatgtgcgaaaagcggggacagagcatcgtcaagacctttgaccgcgccgccaagctggccgcctacaacatgtacgcccacgatattcccctgcggaacgtcgtgccgcattactactggaccggaaaacgctgcccccacctgctgctggacaacggcaagcccggtttcaaatggtcctggttcatttcccgcgtggattattattaccgctgcatcagctaagcgccattccacgcctcccgctgcattccggatttgaggatggatggaagactcctgaccggggttgttcccttgctttttgccgatcgtgttaaagcggcgggcacagcttttttgaatccatcattcgctgccagccggcaatgcgtccgcgacgcggcatcatgtaagcggatcagggaatcaacagcctccgcgccgtccccttccggtaatctccgcagggtctgcaacccggcggcatgaaaaaacaggacggcttttatcaatcccgcctgtcccaacgcgccaggctttgaaacgcagcaatctttcaccaagtaaagatgacgcctcaaacaggtggaccccgcatttatccggagtccgcgctatacccccccacccttccgaaagaatgatgcaaggatccttgcggaagcatgccttttcccaaacgaaacggaagacgcaggaataacaaaatccccggtctttttataagaagacggggaacgcgcaggatttcacgaagcaacttggaaacacggcattccgcgaatcccggagggggaacggaaaagtccgccaggtctcacaaagccccttttggaaacagttccggagcggtccgcgttcatccgcaacagaagcctccatcacgcttccgccgtccgcggcgcagccgccggagcataaaaaaactccgcagccgccaggtccacgcacaaaccttgacaactgcggagctgcgcttacacacacttattcatccaacaaaaatcactcagcgtggcttccatcaggagtggtggaaggccgtgccttcttccgccgtcatcggggaagtgaccgggtgtttctcgaagaaggccagcatgcgcttgaagtcttccaggaacaggtctgccaagtccttggtgaagccctggcggaccatcacgcgcatcaccaccgtatcctggcaattggcagggagggtgaaggcgggcacctgccagccgcgggttctcagcttgtccgaaaggtcgaagagggtatagttcgtcttggctccgtccttgatgaagaaacagacggcgggaatgcccttttccggatcgcccgtgcaaatgaattcgtacggcccgagcttggaaacctcatctgaaatgtacttggccacttcataggcctgggtatggatgttggtatacccttccttgcccagacggatgaagtcataatactggcagatgatctgtccggccggccgtgagaagttaatggcgaagttggggatttcaccgccaagatagttgacgttgaagatcaacccttcaggcaggtcggcgatgtctctccataccacccagcccactccgagcggagccaggccgtatttgtggccggaagcgctgatggacttgacgcggggaatgcggaagtcaaagacaatgtccggagcgcagaacggggccaggaaaccgccgctggcgccgtccacgtggatgtccacactgatgccggtcctgtcttcgtaatcgtccagggccttggcaatctccgccggcagttcataagcgcccgtgtaggtcacgccgaacgtgggaaccaccacgatggtgttttcgtcaatctgttccagcatgctgtccacatccatcttccattttccgggtgacatggggatttcacgcatttcaatatcccagtagcggcagaacttgtgccagcagatctggacgggcccgcataccaggttgggcttgtcagtgggtttgccggcagctttctggcgggctctccagcgccacagggcggccatacccccgagcatgcacgcttcactggaaccgatggtggaacagccgatgggtttttcatcctggctggcgttccaaaggttggcaatgatggcagcacagcgcatttcaatagcggctgtctggggatattcatccttgtcgatcatattcttgttaatactgatattcatcagcatcctgacctgcttttcatcccacgtctggcagaaggtggcaaggttctggcgggcattgccgtccagcatcaattcatcggacaccaactggaaggcgtcctccgcacgcatggcgtaatccgggaactgatccttgggcagtaggttgtctgcttccggagagccgaaaatggaattttctgcccgggctgtatcgggtttttgatttggatcaaacatgacggtatctattgtttcatcatttccgggccagccgtgaaagaccgcccgcatgaaggatagaagcttctacgaacaaaagtgttcatatttctattgtcattcacccccgcataacttttctacaaaaatacaggaacaagctttattttattatccatgcgttactaaaaatcattaaattacaaaatttgttatatttcctgacctacactcataaaacaccctatgtatgacacaggccatattttcacagatgaggggcccggacgttttcagcttcaacggccaagcggaataatatgttagaagagccttgcgcatagcatgacatccgttgagaaaaaacgcgctcaaaagactcttatagtttccagacaccggtgccagcgcgcgcaaaagcccccacccgggcgcccgggcaaaagacggctcaggtctggtacctaacaaagaaccttaccgcatactaatgaaaccaaaatttgcagtatccgccatccttctcctgatgacagcctccctggcgcagacgggaacagcccaacaggctgaagacctctatcagggcaccgttgtcacgcgccaggagacgcaggacagcatcacttacaccttgaaggaggacctgagcttttccggattccggacggaagacaccgtcttcgcaggcagcgtcttcttcaatcagctggcagaccacacccggcccgccagcgagtccgtcatgacatttaccggcacgggaatgtccatgagctttgacgattgttcctccatccacagcgaccgctgggtcaatgacaacgaagggggaggcgccatccgcggagaaacgctcaccttcacggacatgggcgacctttccttcaacaactgcaaatccatcgtgaatgcggatacgaatgccgggggcgccgtgaacgcaaggggtgacatcaccttctcccacatgggcaatatttccttcaccaacaacatgctgggtgacgacagccagcaggggcaagccctcggaggggccctgttcacgtggggaaagatcgactttgaaaataccaagtccatcctgttcagcggaaactccaccggacactcgcccacgagcgcccactccaacatcgggggcgccatttatgcaggcgcgcatgattccacttctacggcaaccaaggcttacattcccgccggggaatatgcgctgacgttccagaacgttaccggaaacatgacctttgaaaacaattccgcatggatagccggcgccatttacgcttatgcaggcgccgtagacggctacgataataccggaggcggcatgaagatagccggcgtcaccggagacgtgattttcaggaacaaccgggcggacgccggggaactggcctccgactggaacggcaacttcggcgcagtatacagcggccaggacctggacatctccaacatcggcggagacctgcgctttgaaggcaaccaggccagcaacagcgccggggcattcggcgtcagcggaaacttcaacctcaataacatcggctccatcaccttcatcggcaaccacgcggacaagacgtatgccgtaggctggatcagcaaggactggaacgtcaccaatacgggaaacatcaccatttcaggaaacagctcggacaatcaaatgggaggtgtagccgtcttcggcaataccacgttcagcaacaatggggacatcactgtggaaggaaactccaccaagggttccaacggagccctgcgcttttacggaacgttcagcgtgacggatgcagggaacatttccctttccggaaacagcgcggaccagtacaacggcgccattgaggtgaccggtaatacctcgttcacccggaccggaaacatctccatggacaataatacggcgggctggcactacggcgtggggcagttccacgggaacctgtcctttgccaacacgggagacatctccatttccggcaacaaatccacggactacggttatggcgccctcctggtggatgggaaaacatccttcgtcaatacggggaaggtcaccatctccggcaactcggccaaatgggacgttggagcacttcagggggccaacggcctggagttcatcaacaaccgcggcggtgtgcttattgagaacaactccgttgacggtgttgcgggagccatgctcctctattacaaggatgccgtcttttccgctgaccagggggacatcatcgtgaaaggcaacacggaaaaacgcggcggggccaaccctattctgaactccctggtgtttggaaccaacggaagcgcttccatggacagcgtggtgctccgcgcgcaggaaggaaggacggtcaccttctacgaccccttccggaatgaaggcgacggagcggagtatgacaacattgtctatgacttcaacaagtccgaaggagtggataccactccttacaacggaacggctccggaattcaccggaaccatccgcttttccggagcggaggcggacaagctgatcacccaggccgccggagaaacggaagccgactggcaaaaccggctggcggagtccaagtacttcaatgtcagcggaaaaaccaccttgtacgatggtaccctgattctggaagacggtgtgacatacggcaacaaggacctcaccaaagactcatccttcactgtgaataagggcgttctggaaatcacgggaaacagttccgtgaacagcaggaacatcaccattgaatccggcgtgaccctgagaaccggaaggggcgccgccttccatgcggacacgatcgacatcagcaagggcgtcatctttgacttccgccccttcatggacgattacagctccggcctcagcattgagcaagccaacagccacaccatgggcggctccatgggagtagcggattccctggaggattacgcccacaagagatgggccgagaagcagcgcttcctggccatggccatcggggaagcggccattcccggaacttccggggattttgacgacatctattccacagccaccggaaccaatacggtcaactccccctatacctacgaagggtactggaccaaggaatgggaagacctggacggagacggaatcaacgaccatctgtacgccgtctggaaccccaccgccggcattgaagagattctcccggaactggacggggcggacatcggcaactccatgtggagctccgcttccaacatgaagtccgtttccaatgccgctctgggccaggtgggcatcacccggttcctgatgggtccgaagaataacttctggatcaagggaatgggagacttcacctaccatgccacccgcgacggcattgacggctacgactacaatggcggcggctatgccgtgggtgcggaccgcaggttcaccccgaacaccattctgggcgccgccttcggcaacctgtacggcaccaacaagagccgcagctggcccagcgaagtggaccagacctcctacgttgccctgctttacggagcatggagaaagcagcttgcccccaaggacatgctgaccatcagcggaacagccggcttcggatggacaaccaacaagctggactcctattatgacggaggggcttcccacggcaaatggcagaacagaatgggcttcgccacccttcaggccacgtgggaccacagcctgaacaagggctggacgctctcccccttcctgggaatcgagtacacccaggtcaaccagaattccttcacggaaacgggatatgacgcccggcacttcgaccgcgggaatctgaagaacctgagcctgcccgtgggcgtaggcgtcagcaaggccctgcaattcagcaacggcgtgctgtgggtgaacagcctgtccgtaagctacgtgcccgacgtggtgcgtgacaacccggaaaccagggccacgcgcctgctgaacgatttcagctggaccgcgaggggttcccgcccggaccggaacgccgtacgcgtcaattacaacagcaccgtcgtcatcaaccccaaatggacggcctacgccggctatgaattcgaaggcaggagcaagtcaacctaccaccgggtcaacgccggggtaagctacgccttctaagtcgcgcatgacggcagcgggcacgttccgctgccctgcgccccctgcccagtcaacgggctgcattcctccgggattgcagcccgttcgattttttccggaaaccggcagcaacaagcgtaaagaacgcactggccatttcaccggaaatgcacgcgtccgttgctttccaggaggcagaacaattaaaaaaatggaccggccggctacaccggaaaccccgtcatggaatcatgcgtgggaagcttcccttacatacagcacatgcggatacaggacggaatccggagctactttgggatggttgaattccgccgtcttcctcattccggcacgctgcatcacggcctgggaaggaagattcacacagacggtgaaggaatacacccggtcaaggcccaacctggcaaaaccgtgctccaaacaagccctggccccttccgtggcgtagccatgcccccaggcttccggcacaagccgccagcctatttccacacagggcgtgaagtccgctttaaaatccgcccaatgaaaaccaaggaggccgatgagggagccggaagatttcagctctacggcgtacaccccgtaacccttttcatccagttccgcccgcaggcggttccacatggcgcgggattcctcctccgtcatgacggcggggaagaaacgcatcacccggggattggcgttcatggccgcaaaaaagggccagtccctttccccccacgcccggaatgccagccgttccgattccggcaagagcagttttcctcccggcatggcgctagttgtacatggaaagttccgtttccagctccggacagcggttcacgcggaaccgttcgtccagctccagtatttgactatggcccaggctgtccttgatcgtgagattgaccttggaacgaccggggtaccttttcaggatgtcccgtatctgctccagatttttcctcgtgtggcgcagggggctgacaatgatattcagagggccctggtccccggccttggacttgcgcctcctgcctcccagcgggtccacgctctgcgcggccacgctcttggcggaagtgcggtcatcctcccggatgttggcgcgcacggagacgaagacgcccggttccaggccgccttccatttccagggccttttcatagacatccgaccacagcagcacttcaatgctgccggtaaagtcttccagtgtgaggatggcgaatttcctgcctgccttgctgatcttggggatgatggagcgcaccatgccggcgatctggtgcttctgcttgagttcgtgcgactccagcgcgtcaatgagaccgatgcgggtgtatttttccgcatcaatgacgccgcgcatggagtccagcggatggccgcagaagtaggcgcccaacaggtccttttcatcccccatgcgctgctccttggaccattccagaacagcaggctcatccttcaccctgggagcttcaaaagtcatgtcaaacagggcgccctgccccagggccttgtccttgtgcacctgggatgcgccgctgagggccaggtccacccgctcaaacagggcgcagcgcggttccagcgtccagtccagcgctcccgcgcgaatcagggattccagaatcttcttgttgacggatttggaatccagcctgttgcagatgtcctccatgctggtgaattccccgtttctttccctttcctccaaaagaatctgcatggctccttcccccacattcttgatggccgccagtccgtagcgcacggccagcttgccggaaggcgtttcctccggagtgaatttgagcatggatttgttcacgttggggggcaggatttcaatgcccatgcggttggcttcctgaatgaacacgccgatcttgtcgttgttcgcttcattggacatcaggccgcagaggaattccaccgggaagtgtgccttgaggtaggccgtccagtaggaaatgtggccgtaacaggcggagtgggatttgttaaagccgtacccggcgaatttctcaatcttgtcaaagatggccgtagccgtcttttcatcaatctggttggttttccagcacccttccacgaagtgggccttttccttggccatttttgcagggtccttcttgcccatggcgcgcctcagcaggtcggccccgccgagcgtgtagcccgccagcagcttggccgccgcctgaacctgttcctggtaaatcatcacgccgtaggtctctccgctgacctgttccagcagcgggtgttcatacaccacctggcgcagccccttcttgacctcgatcatttcatccatgaactgcatggctcccggacggtaaagggccagcaagtcaatgatgtcttcaatcttctggatgccgtagcgccggcaggtatccaccatgccgccggattccagctggaacacgcccatcgtgtcccccctgttcagcaggtccagcgtttcccggtcatccaagggcacggaatccagcttgaagtccggcacgcgccagcgggcgtattcctccgcatcatgcatgacggtcagggttttcagacccaggaagtccattttcaagagacccacttcataaatcgcgctcatgtcgcactgggcgacgacggctgcatgaggatcagacaggtcgtcacgggtgagcgccacatgctcgtccagcggacggtcaccaatcacgacgcccgccgcgtgcacgcccacgttgcggatcagcccttccaagcgcgtcgcataaccccagagctccgcgtatccttcatcggaggcgatcagctcccgcagttcctcactgctcttgtagctggactggagggttaccttgggaccgggttcaatcagcttggaaatgcggtctccatccgcgtaggacatgtccatcacgcgggccacgtccctgagcacggacttggcgcccatggtgccgtacgtgatgatgtgagacacggcgcgctccccgtatttctgccgcacatagtcaatcacctccggacggcgcgtctggcagaagtcaatgtcgatatccggagggctgacgcgctccgggttcaggaaacgttcaaagatcagcccgaaccgcagggggtcgatgttcgtgatcttcatggcatacgccaccagagaaccggcggcggaaccgcggccgggccccacgggaatgtcatggtccttcgcccagttgatgaaatccgccgtaatcaggaagtaggaggggaatttcaactggttgataatccccagctcataatccaggcggtcgcggagttccttgtccttagccacgcgttctttgccgtaccgctcctccagtccttcatagcataccttgcgcaggtaatcctcacgcgtggagccgtccggagtgccgaattccgggtatttttccgtactggcggagtccagcttgatggtgacgttgcaccgttccgcgattttcagcgtgttttccacggcgtccggatagtccctgaacacctccctcatttcctcgggggatttcaggtagacttccgtggagtagcgcatgcgcttgggagaagccagcttttcgttggtgccgatgcagatcagcacgtcgtgcatgtcgtggtcctccttccggaggaagtgcacgtcattggtagctagaatgggggtattggtcttgcgggcgatgcgcaccagctccggcaggcattttttctgctcctccatgccatggtcctgaagctccacaaaaatgttgtcgtccccgaagatatccttcagcgccaggagggcttcctccgccttttcaggctggtcattgagcagccattcgttcagcggcccggcaagacacgccgtacagcaaataaggccttcatggaattcccgcagggtttccatgtccacgcggggcttgtaataaaaaccttccagatgggaccgggataccagcttgaccaggttctgccagccggtttcattttccgccagcaaaagcaggtgcgtatatttgcggcgcccgggaagctgttttttcacgccgatgggcgtgggggaaaggtacacctcgcagccgaagatgggcttcacctcctgcttctgcggtccttccggatgttccttgttccaggcggccacggatttgttaaggctgttcgcctccatgaccagctcaatggctccgaagaggttgccgtggtccgtgatggctacggccggcattcccatgcgggaacattcggcaatgaggtccttgatatggactgcgccgtccagcagagagtattccgtgtgattgtgaagatgtacgaaggaaccgggcatgaatgaaacctgtaggcagtgaataaggagaatcaggagttaacggggcattcagccttcatggcttccacgcattcccggatgaggtccggcccgcggtaaatgaaccctgtgtagagttgcaccaggctggccccgaccttgattttcgcgacggcgtccgcgccgctcatgatgccgcctacgccaatgatcgggatgcgccccttcaattcggaggcgaacgctccaatgacttccgtagaccgcgccgtcaacggcgcgccggacaggccgccggcttcttcacggcgcgggctggcttccaccccggcccgggaaagcgtggtgttcgtggcaatgaggccgtccaggccttcatccaggaaaacgcggctgagttccgcaatttgctcatccgtcacatccggcgccaccttcatgaaaatgggcacattgcgtccggtttccacagccaggttggactgctccgatttcagggatgccagcaggcgcgcggcgggttcggccgcctgaaggtcgcgcagtccgggcgtgttgggagaagagaagttgatggcaatgtaatccgccacgggccatgccgcacgcaggcaggtcaggtagtcctgggccgcatcttcattgggcgtcaccttgttttttccgatgttaactcccaggacgccatgaaaacgggtggcggagcggatgttctccactccggcggcaatgccttcattgttgaatcccatccggttgataatggcctgctggggaatcaggcggaacaggcggggtttgtcattgcccggctgcggccgcggcgtcagcgtgcctacttccacaaagccgaacccggcctggccgaaggcgttcaccgtatccgcctccttgtccattccggcggcgagacccacacggttggggaatttcatccccaggatttccacggggtcggaaggaacctcccccatcagaaggggcagtacgcgcatcttttctgccaggcgcagcccccacaaggtcactttgtgggcggtttccggattcatctggaacagtacacttttagcggcggaatataaggcgggtgacacgatgcggggagtgtatcacaccctcctttagggtcaagaatgggaagcgtcttgccgggatgattttatccggtacaattccctgccatgaacaggaaggaacgcctctcatcctgccggctatacggcatcgcggatatgggatataccgctgaacatcaattaatctccgttacggaaaaattgctggcgggcggtctgggcatcctccagctcagggcgaaaaaccatgatccggaacatatcgcgcgcatgggtagccggcttgccccgctgtgccgcgaatacggctgtcttttcatcatcaacgactatcctgaaattgccctgggcacaggggcggacggcgtccatctgggccaggacgacggggaactggctcccgtgcgggccatgctgggggcgaacgccatcatcgggcgttccacgcacagcccggaacaggctctgggcgcgttccgggagcgggcggactacatcggattcggccccttgtttcccacgggcaccaagccgggaaggccggcgatcggcctggaagacattgcaggcgtgcggcggcaattgccggaagagtttcccgtcttctgcatcggaggcattaatggaaacacgctgccctccgttctggaggcgggagcaagcagggtcgtcatcgtttcctggctgcttacacacccggatataacggaaacggtcgcggcgcttagaaaaagactgggagaagcgtgaggaaagacgcgccttcccgggtattgcattccacttccgcggttacccctgtctttcctctacctccggagaaagagccggacgggaaatcagcaggaccgccgtatctacaatcatttgcaggatgcggtcctgatccttcatccacggctccttgtcatgaagttccagccgtgtgacgtatttccccagcgtggcatggaaaatggaactcatgatatgtatgtgccaggatatggaaagctcatcgtcccatgggcagaatcggcgaaccctcaacgtcatctcccggatgagcggagcatagaattcatcgtaaatcttccttcccaggtattccggttcctggggcagccgccacagcaggcgcgcgtgatccggaccgcccagatttttatccagcagcaaacggaaagcgggctcaatgaaggcacgggcatacgccctgagggacggatgaaggtccgcttctttcagcattttcatgcgctcctccatcaggggttccgcatattgcctgaaaacggccaggtacagtccttccttgttttcaaagtagtaaacaatggaggccagattcacccctgcttcagaggcaatcgccctcatggtcactccgtcaaatcccctgagggcaaaaagtttctgcgcggcacggagaattttaccgctggtttccgcagagcggtccgactgggatttgcggatggaagccatcgtttcaaaagatcaaacggtgctgccgcttagcgggaggaacggcttgaaccagcggctttcaccaactgttccatgtcctgggaagactggatgggcttgccgtccttatccaccagaatcatcgtagggatgccgcgcggagccaccttcttggcaagctccgtcaaatcctgcctcagcaggatgggccagggcatgttgttggcggcggcccatttctgggcggcttccaggttctggtccagattgcacatgatcacttccacatccgggttgtccttcaccgccttgttgtaggcctccacgctgtggggcgcattccggcagcacgggccgcaccagcttgcgctgaaatacaggatgaaatgcccgggattcagcttcccgtccttcttttcaagcttgccgttttccagcatgtaggttttccccttcatttcctccgccacggggccggacggcacggaggaccattccgcaacaggcttgcctatcacttccttgtgttcctccagccacgcgcggtcttcctcggaaagcttttccaacggcatggtgatgggctttttggccgtagttaccagcttgacggtcttcatgttcaaggcaataggacgtgcctccaccgtactgcccgtgcttttattcgtccaaatgcggagggacggatcctccgacgctccgggagcgtccgcaaaacagaaggaggaacccgctacgaatgcggacaccagcagaatacgccagggggaaaatttcatgcgcataacgctgatatactacttcttaccttccatgtcgagaagctgattccaaaatctgccttgcctgcgcgtgcccaggatcgcggcgcagggcttccgcggcggcggcggcggcgtcacggtaccgtccgttgcggtaaagcatcaccgccagcgtgaacggaatatccgcattctccttgtccagggaggaacagttttccaggtcctgaagagcctgttccagccgtcccaccttttcattcagcagggcgcggttgaacagggcacggatgaaggagggttctattttcagagcttcattaaaggattccagcgcgcccggctcatcgttgttttcaatctggcccaggcccagcagataccacagattggcatccttcggagccagccgcacggcctccctcatctggtccaccgcctccccgctgcggccctgggaggccaggaaaacggcataatcccggtgcaccacggaagaggtggcatcccatttcaaagccttggcaaaccactgttctgccgccttcgcatccttgcggctgatggctatctgggccagcttcatcgccccggacggctggtccgcctggtgcagggcggcggcggtcagctccttcatgccggggctgtccggcggcagggaatcccggagggcccactccgcctgcaggcgcactaccttgaagggatcattgagcagtttgcccgcggcgggattgcccgcacggcccatcaccttggcggcggcggcgcgcgtcagggagtccggatccttgaccgccgctgcagccagctcctgaacggcaggttcatgcgcccaggcatccatcagatccagcagcgtcgcgcgccatgcgcccacttcctcccgcttgaagcattccatcaggaggggcagcacatcctcccgcccttcataggcacgctgcacggcccgggtgcggtccctgtactgcgccatcttgggcttggccccgtaatatttttccaccgcttgcgcggcccattcattactcttttcccggtggcacatggtacaggcattcggaatgcccagctccacgctcaggaggggatcgggagaattgaaggaatggtccctgcgcggatcgcgggccatgtacaggctttccggcatgtggcattccacacagcgggcgcccatgctggactgcggacacggcgtatgcctggccatgtcaatgacgggggcttttacgccgtttaccgcctccccggtgccgtggcaccgcaggcagagcgtgttatcctcctgcggaagcttcagcgttcccgtatgcgggtcatggcagtccaggcaggtgacgcccgccttgcccatgcggctcaggcgcagcccggtttcgcaataatcctcatccctctgcatgccgttgggccagaaaacgccgggctgtacgggaagcacgagctggaaatggttgtcaaaacggtcgccaacggcaaaatcgtgatcgaattcatcccgccgggcatggcaggacgcgcagttgtcgtgaatttgctccggcgtcagcttgtttttggtggaaatcatgcatcccgttcccgcctccggcttatccagcaaggggccgtggcactggatgcaggtcacgccgggttctgtccaggtggaggcatagcggtccttgaccggatcataatttttatggaacagggacatgtggcaccacgcgcactgcgtgttccagttcatgccgcggcccgtccagtgcccccagtcccctggttgccgggcatccttgccaaagatatcaaaccattccttgcggttcacgtcccacgcggcgctcagggtatgataaccgccgtccttggcgggaaccaggtactgcaccagggggattctccccgtggcccagtccgcgcgccaggaggttgaggactggccgtcatgcaccatgcgcccctctgcatttgtggagaattgaagaatgctgccgtgggcgttcagcttcatgttatggaacgcctcagattcccactggtcccccagcttgcggaacgcccaggcgtgatccgatccggcccactgccggaattccttttcatggcaagccccgcactgcatggagatgggaacttcattctggtcccagtgctcgctgccgcctgagaaaacggccggctgggcctccgcgccggaacgccggtccatccatgccttcatcatcgtgcctaccccgatcagcgccccaagaacaacaaggagaacaacccactttttcatggaggggcgtttcatggaagcatcggcggactcaggttgggacatgacggaaaatattctgccatatcatacgcgctccaccaaggaacttttgcacaaagcaacgcggttccggcgcattcccgcctgagtcccgcggattattcctcttcttccaaagcttcctcccgcatcagtggagtaatccgggttacggtgcagcgttccacaccgccgttctccgtccgggtcaccttgaattccaggccgcggtagcccacagtgtccccttcctccgccggagcttccagcagattgagaatcaggccgcccacagtatcgatttcctcactctgcaagtccatgtccatggcttcccccagctcctcaatacgggcgagtccggacacgtcgcaggagaagcccactgcgtcccgcggcaggtctgtcaatactctgatgcggccgcggtcccagcccatcacctcggaaaacacgtccgtcagggtcagcaggccggaggttcccccatgctcgtccagaatgatggcaaggcgcacattgtccttcctcatgatctccaccacgttgtcaaacttcaccgtcttgggcaccttgggaatggcgtggatgtattcggacgtcagggccttcccgcgcagcatgatgcggaacaggtcacgggcatgcaccatgcccaccacgtggtccaggtccccgcggtagacagggtagcgggtacggcgggtgcggcgcacgatttcccttatctgctcatgcccagctctttccggaatggcgtctatcctgacgcgcggagtcatgacctggtgaacatacaggtcttccaggtcaaacaggccgtccatgatgcggccggattcctgcggcagggcgccgttttcatggctttcctcaatgatgtactgaagttcttccgcagaatggtaatgggatttggattcattcctgtccacgcccagcagcctcaggaagaagttgcccagggtgttcatgcccaccaccagcggatacaggcagagctgaatcacgtacatgggcatcgtaatgatgaggcagagcttcgtggcgtactggagggaaagagccttgggcaccatttccccgagcacgatgtgcaggtacgtcagcaccgctacggacagaacgctggctgcgccatgcgccaccagccaggaggcccagccgtactgggccagccattcgtggagccatctggccacggcatgctccccgtacatgcccagccccaggctggcgaatgtgatgccgagctgggccgtggcaatgtagcggtcctgcaaacggggcgttttcaatatctgggaaacacggcgcgccaccatgttgccggacgcccccatttgctcaagagccgcgcggggcgcgccaagcagcgcaaattccgcggccacaaacaggccgttcagtacaatcagcagcagaataataaaaatcgtcatcatgattccaccccgctttccatggcaggttcatcctcctttttctccggaggcaacagaaggatggaggaaacgcggttgtggtccatcttttccaccaccagcacgcgccccgcaataatcaggcggtccccctccttcggaatgcaggacatgtgcttgatcacgcagccgcccactgtggtggcgccgttcatcaggaagggcaccaggcattccgccttatgggcgcgcatcatgccgggaatacgcacggaaccgtccggcaggtattccaccttttccccggagcggatgaattcctcatcaatatcccccaccatttcacccagcagccgttccagcgtcaccagccccacgaacttgccgtactcatccagcacaaaggcttccttggccttgtcctcccgcagacgagacatcagcatctccaccgtctgcatctccatcacgcacggcacctgccgcagcatggagcgcagggggggcagaacacccttttccgcatacgcggccaccatgtccttgatgtgcagcatgccgatgacggcctcccggtttccttcatacaccggaatatgggtatggggcctgtccgcaatcatgttcagaatatcctcctgggtagcgtccacatccaggcagacgagctggaaacggggaatcatgatctgctccaccgtacgttccgccagggaaagcgcgctgtgcagccgttcgtgttcatcctcctccagcatgccgccctggtggctttcatccagcagcatgttgatctcctgctgggagtggatgtgctggtggcctccggggggcagacggaacagtttaagcagcagaagaccgcttccgttcaggaagtcaatgaaccatgcgaagaaggtcagcgtccagcgcatggggtaatacgtgtacagggccgcctgcttgggaaactgcagcgccagggacttgggcatcagttcccccagaatcacctgcaggaccgtcaggacgaccagcactacaatggcggctacggaattggccatcacggaatccatgccgccaaaccgttcaaacagggggagcaggtaggcggacagttccacctggccgtacgcacccagaatcaggctggaaatggtaatgccgaactggcaggccgcaatgtagcggtccagttccttcgtgttttccaaaatcctcagcaaatgggcagccaccttgctgccgccttccgccatctcccggatcatgttgcggcgcacgctcaccgctgcgaattctgcggcaacgtaaaaggcgttgaccagaatcaggaaaagaataacgaagatgataaaaagaatcatgtatggcgggggtgtccgtaaaacgcaacgggcatccgcatcataggaaccaaaaaaatcctgtcaagaacgggaaacaaaaaaatctgccatgcggaccgcgcacttcattcctccagcattgcttcccgcccttcttccatgataggctggggaatgccttctatccgctttttgctgcttccactgcttcttttcaacctttgcgtggcctccatgccggaaacgcagccgcctttcagcggccagtccatggaacgtctggcttccctgctggacatcccctccacttccggagcggaagcccccctccagcaattctggctcaagcacgtggcgcccctggcggacagttccggcacggacgcgcatcaaaatgcctgggctacgttccgcagcccggacccggacgcaccggaattgctgatagacgcccatgccgacgaagtgggcgttgtcattgcaggcatcactccgtccggctttctgaaagtaaggcccgtcggctttccggacttccagtccatgctttcctgcccttaccgttttgacggggaacacggccccgtcaccgcctttgccggggcggttcccggctggtggctgaaccgcgagccccttccggcaggaggggaatacatcctgtttgacgcaggggcatccagcgcggaggaagcacgggaaatgggcttgagcgtcggccggcgcggcgttccctccaccaagccggaattgctgcacggcacgcgcctgatggcccacggcctggactgccgcctcaattccttcatgctgatggagctggcctccttcctgtcccggcacaaaaaagacctgaaataccacgtcacgctcctttcctcctcccaggaagaaacagggctggcaggagccacggcgtattgcggcaggaaccgtcccaaactagctattgttattgactgcacgctggataccgtccagctggacgacctgccgccccgtgaagaaaacgagcgattgagccgccaggccatgggggaaggccccgtcatttttactcatgacaaaattttttaccagcctatcactgcccaactgctccaactggcggaagaacacgggattccgttccagaaggacgccgctttcccgcccggcatggccaatttcgtccccgtcaagctttacggcggccacgccgcttttctgggcccccccatccgctacatgcattctccccgggagctggcggacctgaaggaagtgaaagccacgctggatctgctgggccgctttctgtgcacgcctccttctgctgaagtgaaaacggcgtccgtgcagaaaaaggaacatccctgacgtcccgcaggaatgccgtacggcaaaaaaatcttcttacggaaggaacggcaataacgcaggcgcgaatccagcccgcggtccagaaacataccgctgcaaaaacaaaaccgccttccggtttcttccgcagcctgttctccttggctgcctgatttttcccggctcctccctgaaacagcaaaaaaacatccggaagatcacgcgaacagcccttcccttcttacagtcaaccccccccttaaacaatcaaacagccccgctcccggaacaaaccggaaacggggctggaagtttaaaggctcaatggaaaaaccgttattccgtgatgccggcggcttccgcttcggctgccttggcgtcgcgcagagcggcgcgcacggacatcttcacacggcccttgtcgtcgatgccgatgcacttggcagtcaccacgtctcccacgctaacgacgtcttccgtcttggcggtgcggccttcggccagctcggagatgtgaatcaggccgtccttgccgggaagcacttccatgaacgcgccgaaggtggtcgtggaaacaatcttgccggtgtacagttcaccgatttcaatggtcttgaacatgcgggtgaccagttccagcgcacggtccaggccttcctgcttggaggcgtagatgtgcacggtgccgtcttcctcaatgttgatgtcggcgccggattcagcctggatggccttgatgttcttgccgccggggccaatcagctcgccaatgcggtcggcgggaatcttggtggtctcaatgcggggagcattcgggctcatctgggccggagccgcaatggcgtcattcatgactttcagcacgtccgtgcgtccggccttcgccacgtggatggcttcttccagaatggagagggggatgccgggcagcttgaggtccagctggtagcccgtcacgccttcagacgtgccgcaaagcttgaagtccatgtcaccgtagaagtcttcggaaccgatgatgtccagaagggtcttgtacgtggtgatttcatgctggtcattctgttccgtcaccaggcccacggaaatgcccgccacggggcgcttgaggggcacgccggccgccagcagggacatcgtgcccgcgcagacggaagccatggaggtggaaccgttggattccatgatttcagaagaaatgcggatggcgtacgggaattcctgttcactcgggacaaccggagcgatggaacgttccgccagggcgccatggccgatttcacgacggttctgaccgccgaaacgaccggtatcgcccacggagaagggcgggaagttgtagtgcaggatgaagcgcttttcattcacgctgcccgtgtagttgtccatgtactggcgttcttccatcggagcgagcgtcgccaggcagagggacatggtttcaccgcgggcaaacatcgcggagccgtgcaccacggagggcagcacgttgatttccgcggtcagggggcgcagttccttgagggcgcggccgtcggcgcgcttgtccttgtccatgatggagatgcggaaggccttcttctgaatgtattcaaagacctgttccacgtcaaaatcggtagcttccggatggcgttccttgatggcggcttccacttcgtcgcgcagggctcccaccttcttctggcgttccaccttggaggcggcatagatggcgtcttcaatgcggtcaccggcgatttcatagccgatttccagcagttccggcttggcaaggcagagttcgtaggaacgcttttccttgccgcagacggcgcggagctcttcctgcttttcgcaaagaaccttcacgttttcctgagccaggcgcagggcggcgatgaagtcttcttccggcagttcgttggcggaaccttcaatcatgatcacctggtccttcgtcccggcaaacaccaggtcaagctggctgttttcacgctgggaattggtcgggttgatgatgaactggccgtcaacgcggcccacgcggacggcgcccacgggttcggcaaaggggaggtcggaaacgacgcaggcggcggaagcgccgttgatgctcagaatgtccggttcattttcaccgtcggcggaaagcagaagggtgatcacctgcgtatcatagaagtagcccttggggaacatcgggcgcagggggcggtccgtcatgcggcacgtcaggatttccttttccgtggggcggccttcacgcttgaagtaaccgccggggaacatgcccgcggcagcggccttttccttgtattccacggacagggggaagaaggtctggccttccttgactttggtggcgctcaccacggtcacgagaacgacggtatcgccgctgcggacgacaaccgcgccgtctgccagacgggccatttttccggtttcaatcgtgatgggattcgtaccaacgttgcattcaactgaatgtatgctcattatatttcttgtctttcagtcacccgcagcctcatcagcccattcagaccggctccgggcgggaagcctgaatggcgtcaggtacgggcagtgcctcaggaagagtgttatccgcagcagccttttcccaaaaataaaggggaacactgtccgcgcggcagggcgcacatcccagatggatcaaacgctccggcccagtcttaccggcttgacagcctgtgaaaatccgaaaatttctcaaggcatgcccgacagaaacgcaccgggaaacgagtccccgaacgtcggatgccagcataagccctgtcaaggagaatgcaagcaaatagtttgatagccccgctgttccgtgcttttccccgccacctgccgggaatggacatcccctcccttccctgccggaaaacttcctccggagcagatgggggcatccccggcggcaagaaccgttcctcatgaggaaccggggcgccgctgccatccgccgccgagagccttgcagaatttgacgacggcattcagccgcatctgcgcggcatccgccatgtccagctccccgctcagcaggctcctgtgcgtatccagggcatccatcagccccacatacccggcctcatactgcctggacgcaatgtcccagctgcggcgcaggcagttcacttcatcaagcgtggcctcgtaaacctccgcgcttttgcggcgttccaccagggcatccctgatttcccggaaagcgttcaggacagcctgctcatacgcggcctggacggcggcgcatttggcgtccacggcgcgcacgacggctcgcttcctccccccgtcaaacagggtctggagaatgcccgctcccaattcataatttctggaagactggttcagcagttcgttcaactgggtgctgacctgccccagctgccccgtcagcaccagggacgggaacctgtccttccgcgccgcctcccttccgtaaaaggcggctttcagccgggattccagctcccagatatccggacggcgttcgatcatgtcaccagggagccgcgccggaatgaccggaggagaagccagcagggcggcattacccccgccgggccttccgcccttcatcacctgcctgggactgtcccccaccagcacggacagcacgctttcagcacgggacagttcgttttccgacagcctgagctgggccagcgttttggagcgctccgcctggacgcggcgcagggcaagctccgggtactgcccctgcacaaaccttttttcatacatggcgcaggtctgttcataagaggcatggacgcggcggatgataaggcatttttcctcccacgtgcgcacattgatgtaggcggaggccacttccgccgtcagccgcagataaaccgcatcccgagcggcggcggaagccagcagttccgcccgggcgacctccgtgcgcgcccgcaacttcccccacaggtccacttcataggagagcacgccggacatggaccacaaatccctcgcccggtccggcaggttgttcatatagcgttcaccttcggacagttcctcgctgctggctccagcttccagttccgcccggggcagcatggcggatcccgcctgcgccgccagggcggaggcctggtccaccaaggcggccgcgcggacaagatcgcggttatgagccacggccttttcttccaggcggtccagcgcacggtcattgaagatgcgccaccacccggtccccacgggagaagtccgggccgttccctccggcatttccatgacgggcctttcaaatacggcgggactgccgcaggaagccagcagtgcggccatgagaagaagcatcagacgtttcatgaagcggccttcctttcctggccggatttcaggcagaacagggcaaacagcacacctgccgcccccacgatcacggtgcaaagataaaaggtatccacggagaacacctggctctggagcgccacggccttttgcagcaccgcatccacggatgcatggatttcccgcgccgtgccgccggtttccgcaaagtgcctctgccacatgtcaagcgtatgcgccgttcccggggaatcgtcccttacctgttccgccatgctgaagcggaaccccgttttcatatgggccaataccgtgctcacactgctgacgtacagggaaataaagatgtagcgcacggtgttcagcgtccgggaggaagcggcggcggaacgcccctccacccctctcagggcaagcggcgtagccgtattcaaacagaaagcataaccgattccgaacagccccaggggccacgccacgtccagccaggagcagcccgcgtccagccgggacaggaagaaggcggaggcgcccagcgccagcagccccgccatcatgcccacccgcagggccagcctgcccttctgcatcagggggagcaccagcgccgcgccgccgcaaaatccggccaccagaaccatgaacacataggcaatgcccaccggttcatagttcatgacattgcgcatgaactgcaccgtccccacccgcacccagcaaatgcagaagatgttgcacagggacgccagcaggccgcacaggaaccgccagttgcccagcacgcggacatccagcaggggggtgcggtgggtcatgcaggaaatgaaggccaaggcaaaggaacaaaatccgccgtacatccaggccagcacgccgggcgccgtccagccgtccgtctccccgtaaataagcaccatcagcatgcacacgcatcccatccccaccgccaggaaggaaaaccaatcgaatttccctcccttgggaatcttctggttgggaacgtacagcgtcgtcagcacggccaggacggccgcggccgcacccacgatgacgaacagcccccgccagtgccagtactgcaccagcaggcaccccactaccgggctggcgcaggaagccaggccaatggaacaaagtttcacgcccatcgccacgccgcggcgctccggcggcagggcggcattcaccagccccgttccgtacaccagcgccaggccgcctccggccccctgaaggaagcgggccgcaatcatgaggaagaaatggtccgccgccagtcccagcaaggttccggccagcatgatcagcagggccgtgcgcagggaccttctcagcccgatgcgcgcccacagatacgccgccacggtaaaggaaagggcagttcccagcggacacgccgcacccgaccaggaaacatccagggtgccaaccacaaatgtgcctgacaaatccggtgtggccgccgtgatgcagcccatattcagaaacgtcagcatcgtgcacgcgcaggccatccccgtcagcaggcgccgtttccacgccggaaacattgtttgcataaccggaccgctcatactttttccttaaaaatcaatggaaacctttccctgcattcccgggcggaatactacgccatcctccggcttcggcaggctcaccttgacgggaaagcgctgcatgaccttggtgaagtaaccgctgacgttctccgtggaaatcagggagaatgtcgcataggtggccgcccctatttcataaaccgtgccgtgaaaaaccctgccgtcataaccgtccagcgtgaactgcacgtcctgaccctgccggatgcgccctatcttggtttcctccacgcggacgttgagccagacgtccccgccgtccacaatagaaaatagcttctggccggaactgaccatctccccgccgttcaccagcttgcgggccaccacgccgtccacgggggatttaaccacgcattccccgcacagcacttccaactcctccagttccgcccgtgcggcttccagctgggcctgggcggatcttttttcctcctcgcggtaaccttccagcttgagggccagattctcctgctccgccttctccagcgcctgcgccgccaggtaggtggcccgtacggcgtcccggtccgcggagctgatgcctgcctgctccctcaccagcttttcaacgcgctcgtaatcacgccgcgcatgttccaggctggcggaggcctgggccgtcctggcccgctgggactcgatttcctgagggcggaagccggccagcatctcgtcatgcctggcctgcatcagcttgacgcgggaacgcgcggccatcaggcgcgcctgcatggtgcggctgtccagatgggcaagcgtctgcccgcggcggacggtttccccttcctccacatccacgctggtgacgcgctccgccagctttgatcccacggaaacgatgctcgcctccacgcggcagtcgtccgttttcatggtgcggctctcccggaaatgccagactccccagccgatggctcccacggccgccagggccatgctgcccagtgatatagccttcaaatgcttgctcatgcgccgcaggatgtgcattgccgggaaaatccctgaatgaacaggccaatggtcagcttcatggaggccaccttgtcctgccatgccttgctgtcgtcattcaggcagtacatcagcatgtagccgtgcagggtattgacaaaggcgcgcaccatgagccccacatccccctccctgacctttcctttttcctgcatggcgcccatgtagtcacacaggaaggaatgaagctcccgcgggtcgcgcaaaaaatcatctccgttcgtatccacggagtccagcgcgctcaagtaggcccggaaggcgttccttttggccttcgtcgcctggaagtacaggcgcgcagccagtttcaggtcatgcgccaggtcccacgttttcctgttctcgaattcctttttcagttcgctggcatattcccggtaccggatgatttcatccagcagggactttttggtggcaaagtagcggaagacggtcttttcacaaataccggcctttttccctacttcctgaacgctgacgcggtggaaccctttttcactcatcagttcaatggccgcctccacgatttttctcagcgtgttctgctggacccgtgtcatttgttccatagatgtctgtcaggctaacagacattttttaaaggtcaaggcctcttccggaacaaaaatacggggaaccgcccttcccccgcggcaaaaaaacgaccgctgcggaaaaccgcaacggccgaatcaaacgggaatatgctccgccgtttagcggcgaaggccaagacgctgaatcaggctctgatactgggccagatcttcacgcttgacgtaatcaagaagcttgcggcgcagagccaccatcttcaacaacccgcggcgggaagaaacatcgtgcttgttcgtgctcaggtggtcggtcaggtgggcgatgcgctgggtcaggtgggcgatctggtagctggagctaccggaatccttttcatgcatcttgaattcctgcaaattgatttcgttactcataagtgttttctttgaatgtatttagctcgtggcagcggctaatcgacactgtgagggcgccaactatgcaccatccgtccccaaaagcaattcaaatttcatcatgcaggagaatttgcctccgttcctgcggtagcggcctccccaccattttccaccgcaccccaggcctcgcggtccttttccgtaatgggccgtatcacgcggcaggggtttcccacagccaccacgttggcgggaatgtccttcgtcaccacgcttcccgcgcctatcacggaattgcgcccgatgcgcacgcccgggccaatggccgtatggccgcctatccacaccccgtcctcaatggtgacgggaagcgcaaattccagaccgtcccgcctcagccccgggtccacggggtgcgtggcggtgtaaatccccacattggggcctatcagcacatcactgccgatcgtgacggcggcacagtccagcaccaccaggttgaagttggcatatacgcgatcccccagccggatattcgttccatagtcacaccgcagcggaggttccagatagcagttttcccccatgccgccgaagagctcccgcgccaattcccggcgcagttcttcctcctccggggcggactggttgtaacggaagacgagcttgcgcgcccgaaggcgcctggctgtcaattcggaatcctgggcatggtacaaacgcccggccagcatgttattccagtccttcgagtccatgggatgaagagggggtcacggcgtccgcgccggaagaaggcagcggcgcgttttcctgttctccaacaggcggcatggcagcggcatccttctctacggacgcctctgactttacaagctccttcttcccggaggaagctgaatttgcgccagcccgctgggcggacggcttatgcaccgttctgaaaataccggacggctttttctgaagctcgtgaatattccaatccccgtctctgacaatcacgcgggttcccacgggagccacttcaaacaggttcttcgccaccagatgggggatgcggatgcacccgtgggaggacgggcggccgggcaggtacccctcatgaatgcctacagccccgttcaccctcatgaaatagggcatcttggccggttcaaacctttctccgggccgtgcggcatccttccgtatatccccgtcccgcagctccccggcggcattgatgaacgcgccgtaataggaatggtggtccgcatccttggaggcgatgcggaaatagccggagggcgtcatgccggaactccttccggaactgatgggcgcatacgcgatgcggtgcgtcccgcggtacacgtacatcatctgcttcttcttgtccaccacgaccaggagctttccgggcagggacggatcgtcctcccatttgagcaggtgtcccggaatggttccgctttcctcaaaatacccggtcatttcctccaccggaacattggaagaggaagaaggggaagagcccccacccgtggtgccgcaggaggaaaacaggaacggaacgcacaggcagggaaccagcagatggaaaaggggtaacttcatctcggggagtcgcatcactgcgttagacaacggaaagccggaaaaaggaaccgctttttgacaaaactgtcaaccatcaatcaaaaaaatctcttcccggccccgttttccttccatcaccacatccgtgcgcgcctgccgcggccccggtcattcccgggcccgtggagcagtccatgggaccacgcctctgcaaatgtgcgcgcggcatccgccgtatgggaatgtccgtcatgcacggggctctccaccacggaaccgcccgcacccggcggcctggacctgtacaattccagatgttccacgccgccgggctcttcctctccgcgcacgccgcgcaccctttcctgggtgcgggcatggaagaagctgcgctccagcagttcccgcagcgtattgatgccgcgccagacgtccgtggtcctgggaacgacgcgcacgttcgccaatcccagacgtgacatgttctccacgtaggaaatgccgtgggcatccctccgcgcggcgtcgtggggcagcagatgggccgttaccgccacgccgtgcgccttctcccattccttcattttttccacataatgggccaggggctgctggttggcggcgtaatggtccagccagtggaagctgtcccccatcacctgcacaagccagatggccgtatgatcgctcaaccccaggtcccacgccgtgaaggtgggggcgtccgggtccgccgcaaactccgtccccacgcgcccgcgttcccgcagggccatgatgcggctgccgtaaatgctcccctcctccccggtggagaaagcttcctgcggcgttcccgggtactcctgcttcatggccgcccccatcacgcgggccatcctggcgtaccaccttttctggcccgcatccagcgccaccccggtttcccgttccagggaaaggaagtactcgtccagttcccggctccatctgccgcgccccggcaacgtgtactcctcctggtcaaaccagctaaagaagaagaaccggaaatccaggggagaaagctcgctcttgcccatgttctccatggcctggcgcgtcagttcgtaattcacgccgtaccggccgccctcatgggtgctctccttcaggataaagccgccggggggcaccgtattgatcgcccccgtgcggatttccctggcacgccacggggcgtgcacggaaacatgcgccagctcggaaacgtgcaggaactgcatggtgcccccgcgcaggttcgtccccacgcgcacgtcgctcccgttggcgaaagccaggcggttgcgcgcagacgtgcagggccgccattcccccttcttctccacgccggacaggctcttgattctctctcccagccgggccagggccacatccatcgcggaagggtcgggcggcacgtaatccagatggtcccaggcgaaacgcagcttggcaagcttctgctgggcgtccggcaggctcttatcaataatgccgcaatggaaattggaccggaacaggctcatgtccagcatcagcatggccacatacgtggaaatgcccagttggcgcgccttcaggatgtcgttcctgtaccacagccgctcatgcagccgccgctgcgccctgttcagggagaagcgctggagctgcccggccttgttttctatccagtacaggtgctccagcctccagagctggctggacaggacagactgccaaggctggctccaggattccgtcagatgattagaagtttccatgttcctccactagttctttcagcaggactccctccctggtcattcccttcagggcctccgtccccttgtccaggggcaggcggtaggccaggggatcgttcagcacgtgggagacgaagcgcagagcctgaaccatcacgggatcaagcaggtcaagctcccccctcagatagcctgagcgtacccccagctcttcatacagcctgacgacgtcttccatgaagcacccaacggcctgctccctgttccaccaccagcgttcctgcgcatccgcatcccccagcgtttccagaatccggcccagggaccgggcgcggctctcccgagcggtttccagagaaggctcctctcccgcgcctgtgaagcgctccagcggaatataggaatcccgctcggacgccgcaggcagaccccggctgtccaggtaaacgccgttccacgcatgcaccacatacggagcgcgcgcctgccgtacggggctttccggaatgcccggcatcaggcgaacggtatgccccggatcgtccgggtcacggtaaatcacgcagttggcgtacatcgcgcgcgcctcctccggatcaggcaggaaggggagcatgccccctctcatttcctcctgcctgcggtccagaacatcaatcagggaggcggcttcatccaggggaagttcccggctccaggccgttgccaccccttcgggggccgtccaggaatcaatccggtaggttcttccttgccagatgacgccggactccgcggcttccggccgggctgcaaaatcccgcctcaccacgtccagcgtttccaccgcacggattacctccggacggctgcgccatgcggcaggggcaggaacgccgctcctgacggaaaaatcctcctccatatacaggggggcctccagaacaggttccggcaggagttctcccatggcttccagagaaacatccttcgcgcgcagggttcccttcccggccttgaacggccgcttcaccaaatgcaggtacaggccgggatgctccgggtccggacgccatgcattcaactggggaaactcctgaagcgcccgtgccagttccgtcatgcggtgttccgccagccgttccatcctgcggacggacccgccctcatatccgtccagcgcggccagagaacgcagcaggtcctccctcacgtggtccggcgcggtggacagcagcctgccggtcatcaggctatgggcgtacctttccatcatgggaaggcgcacctcctcaccgcctgcgtcccaggcgcgttcagcccgtatccggtcattcattcccaccgtttcacggagcatgcccatgaattcggcggtttccggcccctccttcagcgttttcttcagcagcccggcgcggcgcaccaattcctccagaggttccagggccttgtccgggcttgcggccccgtagcgcgcccaggaagctaccgtctccggcacggcgtcatggtccagatgggcaaaaaaatactccttggagagctgggaaagctcttcaatcaattccgtttctccgggaagcgccctgcggcgcggcacgcggcccagacgtttcagcatctcccacgcgtcctccggggaaagctggtccgtgcgcatcagccggtcccatacgacctccgccttgtcctcaatcaaggccaggggattctccgtattatggagccgcagccggtgcatcaccagtcccttggccgagggaacgggctgattgtccgcatccactcccagccgctgcacgtcccccacgtacttgccgtggatatccatgcgttcccgcagggcgtcatggctcatcagcgtttcagcggccacgcggcccctgcccgtcacctccagacggtcccctgaacccacggcgccccgcacgccgtaaccggccttcagcatatccgccaccgccatggccgtcaggctgtcatacaggcaggaaagcctttccccctgcacgttttccagtcctgcggtcagccgcagataattggtatcccattccggatgcccgctgcgggcgtgccattcccagctccggatcaaatccctcttggccgtgcaggcgggggaaaacatcatggagacattggccatcaggtccgttcccgccgcctcctgcgaaggatgccaggccgaccacctgccattgggatattttacccgccacagcctttccccgcctccgctcccacgcgaggactggaacaggcgcggagtcaggcgggaaagattttccaccgctttctgcgtacccggataaacgcgcggaaccgcccgctccggaccggcatgcagccgcggcgcatccagcacggtggcataacgggccacgtgttccggttccacttccagaaaacgggacagcagccgcccgtaactctccaccggcgtgtagccgcgccctacatgcacgtcaaactccttcatattgggaagcacctggtacaagctgttcacatccgcctgggttccccataccatgcggttcatctcccgcagctccgggcttacccggtggcgttcccggtcccccagggaagccatcatgccgctcatcctggacagggcggcggccaggccgtccggaccggaagccccggccagcaaatccggagcgttcagcagggagctcccttcctccagccagcggcgcgccctggcacaggaaccctcatcacggcaaaacgactcccacaggcgaagggccacatgcccggacacctcctcatgggaagcgccgtgcacccgttccatcactccctcgtaaacattggcgcgcgtccggcgctccatttccacggtgacggcgtcccagtccctgccggaaaaaccgctacgccccgcttcctccggataagccagcagcagcatcctgtacgggcggtaggcgcgcttcttcagcctgtcttccacaaacgcgcggcgcagggcgtccgcctgcacgtcgtaatccgccgcattcctcaaacgccacggaatttccctcccgttcctgttcctggccagccccaggtcttcctcttccatacggcacagggcttcataccaggaggaaagggcctcttctaccgaactccggccccgggttctcttcatctccatgccgggggccggctccgcctcataaacgcggcggccatccgccgcggcggactctcccacgcggggcagcccggcccgcaacagccacttggtcctggccgccgcatggtccggatggggaaaaagttttttcaacaccgcttccgactccggaaaatccctcatcttccaaggcttcgtgcgcacgggagaaggcagttccagaaaatccctcacgtcctgttccgtccttaaaaaaggctccccggcttcatccagcgcgcgggaccattccagcgcctttctggaaatgtacagggatccccacaggggagaatcacgcagggacttctgcagcaactccccggcacggcgcatgtccttctcccgcaggatgcgggttaccgcttcatccggaatgccaaacaccttcagaggttctccgtcccccagcaaggttccggcatggcggaaatggtgcagggaagcctttcccgcgccgatcagcaggaacggcatcatcatggccgcctccctcaactggtcgtccacggacatctgccgctccttccatccctcccagtccacgccggacaccctgtccgtcaacgctcccacgccttcctgggccaccatgggcgtcagctccatcagcttgttctccgccgccatcttcacggcatccgccgccatggctcccgttccggaaagaaccgctcccacattcccggaagcggacctcatggcccggaacgcgcgcatcccctgccccagcatccgctggcccagcttcgtcatcccgaaggaaagcagggtgttcatccccccggacacgaccgcgccacccatctgggcgtcaaacacgccgtccggattcatgcgccgggcatccgccatgtggcggcccgtctccccggccatcagcagtcccagcccggccgggccgctgaacgccagcgccgtggatgcgccctgctgggccatgtccaccagcatctcccggaaccagggggcatcctttcctccgcgcaggggagcaaactccatcctggcaaaatcccgcagttcctcaaaactccgggaatacctgtccaacgcctccttctcccggccttccgggagggcccaggccgcaccgttcacggccagatgagccacattttccgctgcttccgctgctccgcgtttcagcgcgttccccagggcatcccggaaagcgggccgggaacgcaggtagggggccatcatgcggaacaccttccgccggtccccgtcctccagggacgccagacaatccacggcgcgaacgacgtccggaactccggcaaccgccttccggttcacctgcacggcgggaaaaccttccggcgccggggcctcactggctaccagcccttccagccccctgcggataattccggcggcgtccgccagacggttcctgtcatccagggcgtcggacacggccctgctcttcaactggtccgccacggcctgcatctcctccggccacgcggaaacagcctctttcctccgttcgtccggagccgttccactcccggccagcgtgcggtcatactcctcctggtacaattcaaacaaggtctcccgctgggaaaggcgcacctggttgtgcatggagacggccacaaacaattcgtcatcagacttgccggacgctccatactgccgcgccacctcttcccggatactcttccagtccctccggatgcgttcgcgggggatttcccccgaatccgccacccatgactgcatcacgcacgcggcaatcctttcccggtcagccgttcccgccggatacatcgcttccgccttctgcctgacctcccggggaatggtcatcacatctcccgtcagcacgctgttccagtactcttccttcgccgccgccccctgctccgggaattctcccgcgccggaagggactgcggataccgcgttctcctcctgcaaccggttttcctccatcgttgcggaggccttttccggcacgccttcttctaccaaaaatgtcccgtcctgttcctggttcctctcatcttccatcatcacttgccttcctttccgttattcatattcatatccataaaacctacccagcctgcatcctggaggcggttttccttctcaaaaactttctccatctcctccgccggctgttccggagacctctgcacggcctccgccaactccatctggacgcgtttccattcctccaccgcacgggcgtcctccggcggtccccaggctccgttccggaacatggaggacaggcggcgggaagccgcgcggcgcagctccaggggaacattcatcatcacctcccgccgccggaggagtctttccacctgcgccgcaggcaggccggaagtagccacttcaatcatggcgtccgcatccccctctcctccgcaatcctcatcaatcagggaggccatgcggcacagcagcatgtcgtctcccggaatactgacgccggaaaactccgccgcctgcctccggtccctggaagccgtataacgcctcaactgctcggaactgatcaagccgtgcttctccgcattcgccagcccgtcatcccgcagcaggccgccgccggatacggtagccgccacagcatccgcataacgccgcttcagctctccatatgccgcagaagcctcttgcgccactcttctttcctccggggtctgaggcatttcccgctcccgggaaacgaggcgcactgccgcggccggatcacggcgaacctcctccaccgcccggttcagcgccacacgggcacgagcttcctccgccatgcgggaggcttcatctccggtcacaaacacgccgcggccttcttcaatcctgcgttcggccagggaatcctccccctgctctacggcggactccacccctccggcccaggaccgccgagcctcctccaactggcccagccgggacatcttctgcaaataaatgcttccggcagtctccaggttctccctcgccagctccacgcgctccctcaccggggcggacatccggcccggcaggtaggcgggaagccgttccgccaaagccttcttccacttctcctgaaggcggtccggctccccgccggcctccagctcccgcatcacgtcctgttcaaagcggtacaggccgtcgcgggcctgcgcccactgcccggcatccctcacctcctgcatctccttcagcgcggcacccgccgttcctgccaaatccatcgcgcccgcagccaggttccgcactccggcggcctgcgcttcaaacgcgttcaacggaatcacgccggacaaatccggagccacatgcagcattccaaaatcctgtattcgtatagccatctttttatggcctccaagctagggagcggacggaacgcacggcatccattccaaaccgtcaccgcacggtacttgccgcttgccaaaaccggaccgttccaacacaatcggccccatgccccgcatccgtttcaccaccgcgtacgatggacgcccctacctgggctggcagagccagccgggaggccgcaccgtacaggacgccctggaacgcgccttttccgccctcttcggctccgccgtccgcatccacggctccggcaggacggatgccggcgtgcatgcgctgggccaggtcttccatgtggatgcgccggacacccaccgcattcctgcggacaaatggcccaccgccctcaatacccgcctgccccggaccatacggatcacccatgcggaatacgttcccccaggctttcacgcccggttcagcgcggcgggaaaaacctaccgctactgtatctcccgtgcgcctgtcctcagcccttttgacgccgggctggcctggcaccgtccactggcctggagcacggacattctggagcaagccgtccggctctttctgggaacgcatgactttacggcctttgcggccctgcgcggcaatgaaccgcgccccatcccggcggactacttcctccgcaccatcacgcaggcgcaggtggtgcaggagggggaacgtgtcttcatcaccctcaccggaacgggctttctctataaaatggtgcgcctcatggcaggagccgctcatgaagccgcgcggggaaaaatcacgctggacgaactggcgcgcctcattaactacccacgcccggatgataaaagcccgttctgcgccccgccggacgggctcacgctgatgcaggtccactacgcggaggaagcccccggaaacaagcaggaatgaggaaaaacaggctgcttcccccctagctgcgcgccgcgccgtacaggccttcccgcctgatcaggctctccacctccggattcaaatgaggcacggggcatacgcccgtacgcagatcatgccgcacacgggtggaagaagcgggctcatccccctcaatgaaaacggcgcgcaccccttccctgggcgccggttcaccgccgcggtggtacacgatgaacgtcaccagcccggccaggtgctcccagcggccccactgttccagggaatcccactggtccttgcccatcagccagaacagctccgcgccgggataacggtccgctacgcactccgccactctccaagaccacgaaggcggcggaagattcaaatccgtccggtcaagcacggcccaatccagtccccgaagcgccagatcaatcatccggcaacgctggtcatccgtcacggcgggggcctgctccttcagcggagacagggagcacggcatgaacagcacacggtccagcccgcagtactcacgcgcatgcgcagccacacgaacgtgcccttcatgcacgggatcaaacgaaccgccgaaaatgcacagcttcaccgtccgtcatccgtcaaaaaatcaaagtccttccgtgcccttgtaaggcaggaacccgccgatgggcacgcgcaccatcctcttttccagaggcaggcggcggaagcgggtgatgaaatccgtcaggcggccgtaattgcgctccgtcttgggaataccctgctggccgcaattcacgtccggattgtaatgcagttcaatatgaaggtgggccggatacatgccgcggttcgtgccgatggtgcccacctgggtgccgcggagcaccaactgccccagcacgacgttaatatcattcaaatgggcgtaaagcgtctggcagcaaagaacctttccggacttgggctcgcggaaggcatggcggacaatcaccacctttccccacgcgccgcgggcgtccgccgcgtaagtcaccacgccgtggcccacggaataaacgggatcgcccagatcggaattgcccccgctgttgccgttccagtcctcgcccatgtggcgggggcttttcacgcgcaggccgcgggaccggtaatagccgttgccgtcaggcttgcctaccggaaaatcaaaaccgtcgcaaagagggacgagcgcgaacttgctgtcccgccgggccatgtaaacgggagcgctctcgctgataaacgcggaaccggtcagaagaaccagcgccagcagtaaaaaacggaaataggacatgggaacaaaagtcctctgtatgctaaacggaccccggtcccgtatcaagcggaattccccgcatgtcgaagttagagcctgctaacccccttcgttccccttccaccctccctttcaacttgacagccaagcccccgtatgaaagaagggtggaacattccccgtattttttaacacacgttttttctgcatgaacaagcttgcctccctcttcctcggaacggttctctcttcttcaatgctgcccggctgggccgcagaccctcccaagccctacggggcggtgccaaccccctcccaggtcaactggcagcgcatggaattctacggcttcatccactttggcctgaataccttcacgggcagggaatggggctatggcgacgaaaatccgaaaatcttcaaccctacggacttcaatgcctccgacatcgtttccaccttcaagaagggcggcatgaaaggaatgatctatacggccaagcaccacgacggcttctgcgcgtggcccaccaagtccacggaccacaacatcaccaaaagcccgtggaaaaacggcaagggagacgtggtcaaggaattcgccctggcctgcaaaaagcacggcattaaattcggcacctacctcagtccctgggaccgcaacaatgcggactacggcaaggaaggctatctggacgtttactacaagcaaatccgcgaactgctgaccaactacggccccgtctttgaaatctggtttgacggcgccaacgggggggacggctactacggaggggccaaggaaaagcgcaacatcggcgacgcggaaaagtactacaactttgaaaaaatcgtggagatgatccgcaaaatccagcccaactgcatcatctggggcgcgggccactacggagacgcccgctggggcggctctgaaaagggccacgtcaactacccccattggagcaccgtggggctgaacggcggaggcggaggaaccggcaagcgcggcggagaacgctgggtgccggcggaaggggacaccaccatcaaccattccggctggttctggcaccaggggcaggcttcccgcgtcaaatccccggaagaactcatgcaggtatggtttgactccgtgggacgcggagccaacctcatcctcaacgtggcggcggacaaaaccggcaaactggaccctgcggacgtcaaatccctgatggaattcaaggaactgcgcgacaagctgtatgccagggactatgccctgggcgccaccgtcacggccacccagacgcgcggcaatgacaaaaaattcgccccctccaacatgacggacggcaacatggaaacctactgggccgtggaggacgacaacctgacgcccaccgccttcattacgctgcccaaacccgccaccttcgacgtcatccggctgcgcgaacagatccgcctgggccagcgtgtggactccttcaacattgacgccttcatcaacggcaaatgggtctgcatcgacaatgaaggaaagaccatcggcaaccaggtcatgcggcgtttgaaccgccccatcaccgcccagaagctgcgcctgcgcatcacgggcagccaggccacgccctgcatctctgaattctccctcttccgccagccggcaggcgccgtgcggccctccatcttccgccgcggagacaacctcatcatccttgcggacggcaagaacaaaatcctgtacacgacggacggcagcgaacccaaggaaggctcccccgtctatagacagggcgccaaatttgcggaaagcggcactgtcaaggctcgctgccaattctccaacggcaagctgggtcccgtcagccaggccaaattcggcatcagcaaaaccgggtggaaggtgaaaaacgccacttccggaaacgctgcggcggccattgacgacaatccggaaacctcctggttcgccaaggctgaggcgccccaatcctttgtggtggatatgggcaaaccctaccaggtctccagcttctcctacctgcccaggcaggatggaaaaacctccggaatgacggacaaataccagtttgaagtgagcccggacggaaaaacctggacgaaggcggcggaaggggaattctccaacctccgcgccaatcccatcgagcaatccgtcaacctcaagaacgtcaaggaacccgtacgctacttccgcttcaccggcacgaactcgctggacggcaacagtgcttccgctgcggaaatcaacgtcttcggcacgcccgcaggcaaataaaatccattcacttagctgcatgaaggcgttccggctttttcaggccggaacgcctttctcatgacacggcctgtttgcaaaccatgttccggcgtggaaaagaaaagccattccttcccggctggaaaaccggaatggagaacgggaccggagttcaactccgcttgcgccgcatcagcaggcaggcgatgccgaacatgcccagcatggcggaagacggttccggaacggcctccgccttcagagacgccggcaaacgcagcgtcttgggatcgggagaagacgtcggcaccgtattttcagtaagcagggaatccagagaaagctcttccttcccggaatcagccacagcctcatctccggccgcctctgtccctccgtcgggcttcctgtccggagaaacaggcgtctccttgtcgtctgacggcttggagctggcctcattatccggaagacttggtttaagctggttggcggcaaacccgtttcccctgccgggaggccctccgtaaaatcctccgccgccgccatgggaaaccatcgcgccggacaaggggccgtacacggcctcccgcaccaggacttcctcacaatggggcatataggatcttccataggaaaacatggctaccacttcccgttccagcttccaggatacgtcttcatccagctcttcccgggcctttacctgcacgggaagagccatcccaagggcctggagctggtttctctccaacacggaaaaagcctgcactacattcccgcgggaggaaacaaaacggtacacggtataataaccggaaggaaaagagggggaggaaatagtcagggctccgccttcattgatctccttgaccatagcgggagacaaggacatgacgcccttcatttgaaccaccttctcctcaccaggggcggcggctccggagggtgaaccggaaggcagggcggcgcatgccagtggcgccgctaaggataacagggcaatcacaatcttggtcatgataagtgtattgaaaccatgaccactccgtagcgcacaacggatgacccataaatgacaatagctcacgggccgcgcctttccgctgccccatcatgcggctatccggcggcagatataaaaaatagctaatcaaatgcaatccaaacaaacatggggaaatccaacaacgttttttactccttgttcccggaccaaccgtggccgctgcctctttttaccgggccggccatttctgtcatacggtgtggaccggcggttcggaatgctccagattccagtgaaggggcatgaaaaaggacgcatccctaaggatgcgccctgtgcaaatcatgctaacggaaaaaacttattcctggccgctgaaatcaggcgtgagaatcaggaactggtcactgacatccttgccccttctcttgggaatgaaggtgtcctgaaggttgtcgttgtcatccagttccagagtcttggcgctctgggcggtcgtgaaaatcagaaccttgccgcggaagctttccgggtcaaagcggacggcgttgccagccacgacggtgctgccgtcttcaccggggagcacggaagtaaccatcaggggatattcacccacggagctgccaatgcctaccttcttgttattgtcacccttgcgcatgacgtaggagaagcccacttcaccgggggtcagggccttgccgtcatagatttcaccgtcgggagtaacggtggaaccgccggaaggagtctgcaccttggcgtagaagttgctttcggaaacggactcattgcccagaagctggcggaagtagtcattggaggtatccccctggagcgcgcccaggccgctcatgtaattgtgctgcgccaccacgcggtccgcggtgatgtcatcggggaagttgcccagcttgctgttggacttgaactcgttcatcgccacacccacgttcttcatgttggtcagggcctgcatctggtcgcccttgttgatctggttcagaatcggaccgtacgccacggaagccagcagggcgataatggcaataacaaccaaaagttcgatcagggtgaaccccctgcgtaactggcgtgttgcaaaagatactttcattgttggatatgatggaatgtttacagtttaagaaaaccgtacgtggttatctatgttcgtctctactattaacgtgatttcccagtcaggacaagcatattctcataaaaatgttgggcctggaagggcgccgggattcctccgcggcccccgtttgccgggagccggaacaatcccgcgccatgggaaattcatgcctgcctgccgctgccgaaaaaggcgctcagcccttccagcgcgtcggcgtccggcttgtccgcatcggcgatcacctggcgctgaagcccggcaatctcttccaggcccttgcggcccagttccagcatccggctcatctggtccgccgtaaacacggcctcctccccggagccctgcacttccacaaactcaccgcggtccgtcatcaccaggttcatatccacctccgcatccttgtcctccacatagcaaaggtccagcagggcttccccgcccagcatccccacggaaacggcggaaaccagcctcttcatgggagactccgccagcttgccttgcgccaccagcttgttcacggcaatggccagggccacggaagccccggtgatggaagcggtccgggtgcccccgtccgcctgcaaaacatcgcagtccacccagatcgtgcgctgcccgatcttgcccaggtccacggcagccctcagggagcggcctatcaggcgctggatttcgctggaacgtccgtccagcttccctgccgtaatatcgcgccgcttgcggtcaagcgtggaataggggagcatggaatactccgccgtcagccagccgccctccacacgctgaaccttcatccagcgggggacatcctcctcaatcgtaacggcgcaaatcaccttggtgcggccgaaggtcaccagcacggaggccgtggcattcggggcaatccccgtttcaaagctgatcgggcgcaactggtccacaagtcgtttatcctgacgttccatgcggggaatcatgacggatgccgccatttttttcaaatggaaagatggaattcccgcatcaaaccgctaatatcccttccatgaaactccctcgcacccgtgtggccgtcattgacgtggtggccctttcccgccagatgatggaacacatgccgcgactctccgcctgggcggaggggaggcgcgtttcctccttcccccctgcctttccggccctcacctgctccgcgcagagtacttatgtgacggggctttccccgcgggagcacgccatccccggcaacggatggtacaaccggaacatgagtgaaatccagttctggaagcaatccaacaaactggtgcagggaccgcgcctctgggaaaagctgcgggaacggtacggacccggcttcacctgcgccaagctcttctggtggtacaacatgtactccacggcggactggaccatcacgccgcgccccatgtacccggcggacggccgcaaggtcttcgacatctacacccagcccatggaactccgggagaccattaaaaaagacctgggggaattccccttccccaccttctggggccccatggccggcatccagtcctcccgatggatagcggactccgcccggtgggtggaacggaaacaccgccctgccctcaacctcatctacctgccctacctggactatgaccttcagaaattcggcccttcctcaatgcaggcggcccgggcggcggaagccatggacggtttgctctgcgacctggtcgactttctggaacaggaaggcgtcacccccgttatcctcagtgaatacggcatttccgacgtctcccgcagcattgccctcaaccgcctcttccgtgaacggggctggatcgccgtcaaaccggaaatgggtacggaaatgctggactgcggcgcctcccgggcctttgctgtggcggaccatcagacagcccatatttacatcaacgacccttccgtgaaggaagaggtgaaaacgctgctcgccgccacccccggagtggaggaaaccagggaaacggacttctccggcctgaatcctgcggcgcaggaacgcctgccggacttcactgccgtcgcggccccggatgcgtggttcacctactactactggctggacgacgccagggccccggacttcgcccgctgcgtagacatccatcgcaagcccggctacgatccggcggaaatgttctttgacccgaccctctccttccccatgttccacgccgccgccttcctgctgaaaaaaaagctgggcttccgcgcactgatgaaaatcattcccctcaacggagaccaggtgaaaggctcccatggcagggaccgggtacccgcaaaccagcagcccgtattcatcggcccggcatccctgccggaaatccgttccgcgcaggacgtgcatgaggccatcctctccgcctttgaaaaagagtgacggcaggaagcctgcctgtcagcgggcgtccgggcggggatcatattccaggcccggaacctcccggtaatggacaccatcccacaggacgggaatacagcagaaaaaccagcttctctgcccgttgtcccccttccagtggccgaacacgctgcgtatcagtacgcggttcaatcccttgcggagcttcaccttcacggggggacggaagaaatacccctcccaggtcaggggggcttcttcaatgcggccttttccccaatccgtccagggcaggctcctgaacggccacctgggcggattcacgcgctttccgttcagccacacgtccccgccggaaaaatcccagctcccctgctccggagcacgggcactgcggtacccgcctgaatgcccccacatgccgttcaggccaaccatcagccacacttcctgatccttcgggctgcggatggaagtcagcgcatagcaggttccgctgccctttcccacgtcccccgacatcagcgtgggccagtggtccagccggtactggttccggtgcatattgaacatcgcaaaaaggtgcctgatatgcacggctccaccgtaaacaggcgtcttcttccactccagcgtcctgtccccgtcccggtagaaaggcgcaatcttgcgctccggttcaaaggacgtgtcattcttaccccggtggtcgaatggccctatcaggctccaggccatatccgcctgcttcacgtacgcaaagggaacgtcccggaaaaaccggtcacggtgggaagccagccgttgttcaaactcccggaactccgcccatccggccgttcccctgggagggagctgcgccatgtaatccttccgcttggtggcgctcccgcgccagacgcgctccgcaaacgtcagtacgcaggggtaaaggggatactgttccagcaccctcttctcactgctcaggttcccgtcgcaccacacgggcatgatggctcccaacgccttctcatccccctgcggcacctcgcagggctgctggaaaaacacttggtatacgccggactgggaatcagcccagtcaatgtaaaagccattgctgtcaatgcgcttcattcccttgtccatccgggctccggcctcgctctcgccccagcacatcagcacggaatccttatcgtgcgggccacccggcgaccacacgatcacctccttgcccttcccgcggatatactccgccatgcgcggaataaaatccttcatcgtaatgtgcacctcgtcggaccccatgtgaaaaaaccttcctggaaacagggcaacggtctcgtccacgacatccttcagtatggaaatgcccttctccgtctgcatgccggtcttcatggccttggcgaacggctggctgtgccccggcatgtcgatctccggaatcacctggatattcagccgggcgcaataatccgtcaggtccttcaactgttcctgcgtataaaatttgcccggtaaccgtgacttccagtgaaaagcgcggtctgtcaaagccggatacttcttcacctccagcctccacgcgggatcatccgtcaaatgcagatgcagcgtattgatcttgtagcgggaaacccggcgcatcagctccttgataaacgcgggagacatgtaatagcgccccacgtccagcatcataccccgcagggcgaaggcgggttcgtcactgatctgcacggacggcatgaaaaaaccttccttctctttggaaaccagctgccgcagcgtttgcagggcattgaaaaaaccgccaaagtcccctgccctgacagttgtcttttccggcgtgacggacaggacatacgcttctccctcaattccggcgtccaggcttaactcccatgtcagggaaccttcctcaaaaacatccttgctcacggcagccggaatgccggatatcctgaatacatccttcatttccctcaccaggtcatctctgcggggaacatcccggcccaaatgtacatgaacgcttttaaaacgcgtgctacccttacccctgacgactttggaaggatagggaatcagcgcaggggaggaaaactccggcacaggcgcagttaccacctcccctgccagcagctcccacgggaaacaaaccagcagggcaataaaaaaccgtacaggaatgctgaaaactctggacaaaaacattccttatttacgccctcccgtctcaattcctgtcaaaacaggacttccggagctgaaaacctgtccctctcccctggtcttttaacactacatgccggttcctctacgccgccagttcacaccctgaaacgaacggggaggaaagagcttcttccccccatcttcttccatccgtcaaactgctaccgtgctcagcgcaggcgttccatcaaggcgtcaatgtccatggaatcctgcccatggatcagctcgccgagaatgggcgcgtcggaaaactcctccaccatgctcctgttcgtcacgcaggccgtatcccattcatccttcacgttattaaacacaatgcccaggcattccaggccgcgcgccttgaccgcattcagcgtcagcagggcatgattgatggcccccagcttgttgccgatcaccagcagcacgggcagcttgaaatccgcggccacgtcgctgaaattccggccggggcctatcgggacttcccatccccccacaccttccaccagcacgcattcatgcgcggcggccagggcgtcataggcgcggcggatggatccttcatccacctgcgtattctccagccgggccgccacataagggcaggtggcgttcttcaggaaaacgggattcagctcgtccagcgtcagcccctccggtcctgcctcgcgcagaagacgggcatcctgcctgtctccgcaggccacgggcttgaacccggcggcattgatgcccgcttctctcagggccttgacgatcaggcagctcacataagtcttaccgacttccgtatcggttccggtaacaatgaaattcctcataacggtaaatcttcagggatgggatcttctgatctcctcaagctgcccacgggagggcacgccgtcgttcgtggtcacccagtgattgataaaagaccagatgatcacggccagcaccaggcagaacagcttggccggccagttaagcaatagcagttttttcattggaaggagaaatattcaatagctcttcaaggcggcccttcaactgttccggcgtcaggttgcgctccagcttgccgcccacggccagggcaatcgcccccgtttcctcggacaccaccaccaccacgcagtcgctctcctcggacatgcccacgcccgcccggtggcgcagccccagggtacggtcgctcatctccttctgggaaaccgggaacacgcaggccgccgcggaaatgcggtcgccggaaatcaccacgcctccgtcgtgcagggcggtcttggtatggaaaatcgtcagagccagttccggagaaaaaatggcgtccagcttcacgccggaatcctcaatgggcttcatgctgatgctacgttcaaaggcgaacagggcgccgaaccgctggttggaaagcttgctcaccgccttgcagaaattgtccagaaagtcaacccgctgaagcttggcgaaggaggagaagaacggatggctgcccagcttcgccagccccacacgcagctccggctggaaaatcaccaccagcgccagcgccaggccgggggcgaaaatgcgcgtcaggatccatgaaatcacgttcaactggaagaaaaaggccagcaccaccaaggccaggaaacaggcgaacagccccaccatgatgcgcgcgccgcgcgttgcatggaaagcgcggtaaatctggtacaggaatacccacaggatgaaaatttcaacgatcgcccggagcgcatccttgatcataatccagtcccacatgcgcaacaagctacacaacaacccgcatgattgcaataccgatcctctccttccacgttgccgttggaggcagaagaacaataccgcctgcggcagacgtaaattcaggagcgcccagcacttccattttgtctatctcatgcaagcatgcgatagaggacagccggatatgaaacagttaatccgcaccccgcaaggcgctttcagaaataatatctcatgcttggaaaagagaagacggaaacttccggaaagccacatacaataaccatacaaacccgcgttttcgaaatataccgtacatgcggtgagtatttcccgctcgacacaggtttgttctagtgaatccgaaaaaccggatcatatcaaatacgacagaaataaatactattcatgaaaacattacctgatctgctccggcaagaagcaaaaggaatttcagcattgaaagaaaaaataggagaaaaacttcaaactacatcttcattccccatcccgtcaggatgcagttgctatggtttttatctggcaaaagacgaacttacgccacctttcaacgacatagatacacaaggcattaatatcgtggtacataaaccggaacaagaaataacctgctatcccattcaacatgcgcgtggagaaaaaatatacgccgtcagctttgacttcagcggatgcttcatggccctgtttgagcaagagggtatcttgtatgctgcacatatcaccacatccagcgatggaaaggtggacggaagaacagcctttcaaaaccttattgggaaagaaggaacaaattatattgtatataatccttatagcggcatgaaagaccacacggcaggaattatggaatttaccgattttgacaacttccattgctattcctttggacaaaacaatcaccttttcattgaaaaaaaggtggaaaaaaatgatgccaatgcattaacgaaatccgtatcccaaggtaaacaaagtggatgcgctattctctaggaatatagggcggactcttctgaatgccggacacctcctcatggatatatggttcatcagaaatcccccattcagagtgatgcccactaggaagaaaaggcttccatgacccgcacatatgctttgccacattgaaattgtcacgcctgatgcgtattgatataaagggagcatgaaactccgggtttacctctctctgttttccgccctggccatcctcaccgtctccacgggctgcatcatttcccactgcaccacccccgcggccggcggcgctcccgccgctgccgtccgcccggggctggagcaggaactgaaaaaggacgtcctctacctggccaaaacctgccacccgcgcccggcgggttatgaaaagaaccaggccagggcggtccaatacatcgcccggtccctgtcggaatcgggagccgcggtcacgtaccagcctttcacggcggacaagcgcaccttcgtcaacgtcagcgccgttttccccggcaaatccgccaaaagggtcatcgtcggcgctcattacgacacctgcggaagcacccccggagcggacgacaacgccagcggcgtagccggactgctggccctgggacgcatgctcaagggcatctccccccatgacaccattgaactcatcgcgtatgccaacgaggaaccgccctacttcggcacggaacagatgggcagcgcgcagcacgcccaaaaactttatacggagcagataggcgtgaaagccatgatctgcctggaaatgatcggctacttctcggacagggaaaacagccagtcctaccccgccgcgggcatgggcgccctgtacccggacaagggggacttcatcgccatcgtcggcaactgggacagcgtcaggctggcgcggacagtccagaaaaacatgcagtccttcctgcctaccgtccgcctgaacctgccggaaatcaagggcatgtgcatggacttctccgaccaccgcaacttctgggccaaagacctgcccgccgtcatgattacggacacttccttcttccggaacccgaactaccatcagcccggagacctgccggaaacgctggactaccgccgcatggcccaagtggtccggggcgtgcaccaggccgtcctgcatttggcggcggacggcaaataaaaggagagataaaaaactcgcaggaccggacggcctcagaccgcctgcccgtccatgatcgtgatgatgcggtccccccggcgggccaggtgttcgtcatgcgtcacgattaccagcgtcttgcgggattcgtccgccaggccgaacaaaaggtccagcacctccgcgccgttcttccggtccaggttcccggtaggttcatctgcaaaaataatcggggcgtcattcgccagggcgcgggcgatcgccacgcgctgctgctccccgccgctcagctcgctgggcagatggttcaggcggtgggacaggcccacgcgcgccatcagctccgtcacgtactccacgcgcggcctccttcctatggaggaagccaggcacgcgttttccagcgccgtcagctccggcatcagcaggtaattctggaaaatgaatcccatgttccggttccggaacacggaccgcgccgtagcggacaaggcgtaaatatccgtgccgtcaatcgtcacctttccctcctggggcgtctccagcccggccagcgtgtacatcagcgtggtcttgccggctccgctgggaccgcacaggaacaccttctccccggcggcaatgtgcaggtccaccccgtgcaggatctcaatggatttcttgccgatggaatagctgcggtggaggttggcggcggtaatcacgggcgcagtataagggaatccgtgccggattaaagttctatattgtcaataagacgcacgtcgccaaaatagacggcggcggccatcagggccggattccggttctcctccagcggctgcatcgtctccgcatccacaatctccagataatcgatgcgcgtgccgggcacggccccaatcatggcggcggcatgttccttcaccgtccggacatccgttccggcccggaactcgtccctggcctgaagcatggccttccgtatcaccacggcctgctctttctgttccgccgtcagccgggcgttccgggaggaataggccaggccgttcccatgcctcacaatctccgccccgtggatgtgcaccgggaaatccaggtcacgcaccatgcggcggataatcgccagctgctggtaatccttcttgccgaaaatggcgtccgtgggctgcaccaggttgaacaacttggcaagcaccgtgcagacgccggaaaaatgtccggggcgggacgccccgcacagcgtagcggataaaaagctctcctccacggtaatgctgcgctccccggaatacatctcctccggggagggggaaaacacgtaatccacgcccgctccctcgcacacctccaaatccttttcaggggtgcggggataggtctggaggtcggaggaattgttgaactggatgggattgacgaaaatgctggccaccaccacgccgtcttctcccgccagcttgcgggcctgttccagcagggcgcggtgcccgtcgtgaagcgctcccatcgtgggaacgagaaccacgtggtcatgcttgcggtgatgcttgagaagggccgccttcaactgggccttggtggaaaatgtttgcatgcgcctaaagtggccccatgatgacaaaagttcaatcctgaaatatagctagaaggttgacgcatgccgttccacatgtaaactggcaaagtcagaagacgctaaaaattatgagattcttcaaaacagcattatgtgtatcagctgcaatggcattaagcgccactgccaacgccgaacttaaagtagcaacggtggacgtgcagaaactcttcgccgactactataagacccatgaagcccaggcagaagtagacaaggctgcccagaccgtgcaggaaaccaacaacacccgcgcggaaaccatcaagaagatggaagccgacttcaacgacatggtcaaacagcttcaggatcccatgctgaatgaaaaggacaagaaggagctggaacagaaagcccagatcaagcgtcaggaagtcatcgcgctggaacaggaacgccgcggcttcgtggaacgccagctcaagtcccttcaggaacagatgaaggtgcgctccaccaagatcatgggtgaaatcaccaagatcacggaaggcatcgccaccaagggcaactatgacctcattctggacaagagcgcccaggctctccgttccaaccaggtcttcgtgtacacgaagcccagcatggacatcaccccctccgtgatgaaggaactcaacaaggacgctcccaagggctttgaccccaccaagaaaaagaccccggccgttcctgccgctcccgcggctccggccaactaacccttgacattacccccgggaaggcggaatcatactcccatgaagcttacacttgaagccgtggccgccctcaccggagggaaaatcctttctggcgaccccgaactgactgtgttcggggtcgcttcccttctcgacgcatctcatgaggaagcctccttcctcggcaacgagaaatacttcgaagactttcttcacacctctgccggaatcgtcctggtgcctccggccctgcccgcgtacccggaaaacgtcgcctttgtggaagtggacaatccttccatggcattcaacgccctggtgaaatacttcatggcttccgcctaccggttcacgcccggcatccatcccacagccattatcgaccccacggccaccttcaatccggacaaaatccatgtgggcgcctatacctgcatcggcgcccattgcgtaattggcgacggcacggacatcggcaacggctgcgacatcggggacggcgtcacgataggggaaaactgccgcctgcacgcccatgtcatcatccgggaacgctgcaagctcggcagccgggtgaccatccagccgggggccgtcatcggttccgacggcttcggcttcctgatgggagacaacggccgttacgtgggcattgaccaggtgggcatcgtggagctgggggacgacgtggacgtaggagccaacaccaccattgaccgtgccaggttcggccgcaccatcgtgggggaaggcaccaagatagacaacctcatccagctcggccacaacgtcgtcgtcggcaagcattgcgtgattgtcgcccaatccggaatcgccggcagcacccaagtcggcgactatgcaaccatcgccgcccaggtcggcatctccggacaccttaaaatcggctcgaaatccgttctgggagccaaaacgggagtcatctcggacatcccggaaaacgtcgcctactggggtttcccggcatctccgttcaaggacgccagccgccagtacgccgcgctcaaaaagctcccggccctcatcaaggaagtccacgctcttaaaaggaacctggaatcccccggcaagtaacgggctttcccctcgccggacgcaaccagctcatctgtgtctgcaaggcgcagccctcaggcctgccccgtcccccagcggcggtgcaggaaccgttccagcggggaaaacagaatcttgtcagacagcaggccgatcaccacgatcacgaacatgatgcccaccacctggttcatcgcgttcaactcccggccaaagtgcagaagctggcccaggccgaagccggtcaggatgggaacgaaaatttccgccgccatcagggaacgccacgcaaaggcccagccctgcttcatcccgctcaccacaaacggggcggaggcaggcaacgtcacgtgaatcaggcaataaatgggaccagcgcccatggtgcgcgctgcgcgggcataaatgggcggaacgttcctcatgccgttggccgtcgccagaatcacggaccacagcgtccccatgatcaccacgaacagcatggccccctccgtctggccgaaccacagggtagccagcggaacccagcatacgctcgggagggcctggaaccccagggaaacgaggcccagggtattctgcatgagctggaagcgggaacacagcatgcccaggggaatccccatcaccaggcctattccataccccatcaccagcctcttcacagtaatccatgaagcttcctccagagatccgtccaggaaggaggagcataaatactcccacacctccagcggagagggaaacaaatagggcttccagaccttctggtcgctcaaatactgccacaaccagatcacgagaatgaaaaacacgagcgagcaggcatgggctccccacttggaccatttgttcctgttcatgccatggctcctttcaaatcacgggtgatgcgggatgacaactgcgccagatcgcggctgttgatatccctgggatgggggaggtccacgaaatactcctcacagacccggcccggatgcggagtaaacagcaccacgcggtcccccaggcacacggcctcgcgcatattgtgcgtgacgaaaatgatcgtcatgccgcaacggaaatggatatcctgaatatcctggtaaagctgttcgcgggtcatggcgtccagggcggcaaaaggttcgtccatcagcaggatgcgggggctggtagccagggcgcgggcaagcgccacgcgctgcttcatcccaccggaaagttcatgaatatgggaatgcgcgcattccttcagccctaccagctccagattcttctccgcaatggcgagccggtccccccgcgtcaggccgggcgtcagcttcaggccgaacattacgttccccatcacgtccagccacggaaacagggcggactcctggaacatcacggtgcggtcccgtccgggccccgtcacgggaaccccgtccagctcaaccaccccggaagtgggaaattccagcccggcgatgatattcagcagggaagtctttccgcagccgctggcccccaccaggcagacgaactcgccgcccctgatattcaaattgatgccctccagcgccaccacctttccgcgccgcccgtcaaacaccttgctcactccggcaatgcggagcttgcaccctccggggccgcaatgttcttcacccacaatcatcttccggcagcctccttcaccatggtcaactgttcctccgccgcctccggcaccaccaggccgcccacgtccggaacctctttcatgaaaccggcctcatgggcgtcccgcacaaactgctggagcttgggaatggaaatcctgtccttcatgacgatgctcttccaggcctccgcaatcaacgccgggtctatcctggaatgggtcagctcctccagttccttgaccacgatcgcccgggcctcctccggatgctgccttatccattcattcagctcttcatgcgcctgcaccagggccttcgccacctccggcttctccttgaggaaatccgctccgcataccagcacggtggcgatggactccttctcgtccaccagcacctttccccccgccgtcatcaccaggcggctcacccacggctccaccgtccacacgccgtccagcttgccctgccggaacaggctgagctgctccggattgggggtgggcagaatcgtcacgtccccgccgcgctgcgtcacgtgcaggccgccgcgggaaaaccaggcgcgggcggaaacatcctgcgtattccccagctggggagtggcgatcactttgccgcggaaatcagcaggctccttcagggtggaatcctccggaaccaccagggcggcgcctccttccacggccccggcaatcatcctgatatcatccccgcgggaacgcacaaacgcattgatggccgggcttggtcccacgtaagccagttcaatggagcgggcaaacacggcctccatggcgctgggccccgcattgtacacgtaccagttgatcctgacgtcctttccggtggcctccttgagccgttcctcaaaccaccccttcccctgccgggaaaaatggtgtgccaccaggccctgcacatgcgtcacgttgggaaaatggccgaagttcaattcaatgacgttcggatcatccttctccttctttccgcaggaaacagccagcaggcagaaaaacagggccggtaaaatcgtcaggaatctggaatgggacataatcaaaaggaatgagttactggggcacagccatttttccgcgccctttcaggcaccgactagcagaagaagccgcccgcggcaagaatccgatggcaacaactttgtcacaatgtggacagcaggaatgcccattttgttgaaaaacaatcccggttccggacctgaaccgggctttattgacaaagccgcctattcccgttacaaaaggctccattcccaacccgccatgcagtacccctccaaccagccccattccggagcatggctgggccttcctccggatgaggaacgcccggtgggccggggcgccaggtaccgctgcattctcctgatgctcctgtactgggctcttctttccgccgttccgcagggcgcggaccgctacgctgaaataggcaccgtcctccccgcctggatgggagcgctggaactgacgcctttcctgctggtgcccgctttcctgttcctggcggtgcgtacgggcgcccaatggagggccctgatgatcgccgtttatgcgggactgctcctgaacctgctgatgaacctggcgcttcccgcgggagccatgtggggcgacctccccgcagccggcccctacggcacgcttgtctggcccggcggggaccaccgggaatggctggtcacgctgccccgtttcccgcagctatgggccctcgtcatctacgtcttcctctccggcaacggagctccgcccctgctccgcctgctggccctgggctggtggtttctgctctgcgtggcccctgtgaacacgggcatggtggggtatgcggacatcctgggtccgctggtcatcatcgccctcgtcctcggctgcatgcacctggcggaaaaacgcgcctcccggcaaaccaggaactgaaaaaagccggggcggccattccatggaggaaacagccgccccagggtcaacgggcatcgccccgcggaagactgccgcatgcggcagcccccggcggaacccgttacttccagatcacttcaaaaatattcacggagcttcccttcttcccggtcaggccaagggccttcaccggcttcttgacggacttcaggctgaacgtattcaccttcctgcccttggccaaattgcccacgggaacccaccgtccgtcggccccgcaggccagcacggaagcttccttaccgtcggacaggacaatggcgggattcgcacggggggaatcacagggaatctccaccttctccggagacagctccaccgggaggaacgtagccaggttgaaatccccggcggctccgttgtcggcagactttcctcccttgttggcaagattcagcttgaactcttccagggtcacctcctgtggggaggatccggcgttcaacagcctgatgcctttgatcacgccgccaatctccgcagaaccgtccgccttcaacggaacctccgtccaggactttccgtccatggaaatgtacaatttggcccacttcatgtccggcgtcttcaaattgacggaggcggactccacggatgctcccgccggaatttgaagccccagggacttcttcggcggcaggggatgcacctccatgatgcgcttcagggaaatatccttgtccccggcttcaaccacagcagtcttgaacgccggagcgtccgtcagcacggaaggagcggcgggggcattcaccttgaaatcccggatggccgtccacacgtcggacttcccgcccggaacaccctgcgccgtagcacggtagcgtacaaaacggcccttcttgccatttccctggtactccacgcgaagcccgctggactccggcatcaggggcgaccaggactgcccgtccatggatacctcaagctggcccttgttcacggcatccgtatcggaatcattgcggcccatcacgatggaaacggtgcgtatctcccgcggagcgcccaggtccacgccgaaaaagtcgcccttcttctggacctccttgcaataatagaaggactcgggatcgtcatccagcatcttctcgatccctcccttggacttggtggaaacataaggcttcacacggccaacggcctgtccgctcacacgggaaagcacgggggtggaccccatgtccagcagctcccgcacggcaggggccatcaccagttcggacggcttgacggcggtctgccacggggaatttttcttggtcacctccgtcacgtgcttgttgatggccttgctgatctccttgctgtaacgctgcatctcggcaagcaggcaggcggcctccatggcgtaattcagcgctccggaggcatttcccgcctccgtggcctcaatcatctgcatgctgttcattccagctttgcccagggactcgaactggatgagccacggctctacctctgcgacgaaagcgggattgttcgatttcgcccggatcatgtccggagcctgggccatcttcgcaaactcggccttcaggcggtcaaacgccttgctttcagacaccttggcgccgcggcggcacaattccagcacctgctccaccacgggggcaatctctacggactcctccttgcggtaattgtgcccgctgggccccccgtcgctgttatggtcggcaaacgtctgcatggcggaggcacagccggggaacaaaatccggatgctgtccttccatgtcttgtcggaatcataggccttggcattccaggtcatgttagccacgctgaacagggaaatcttggaggcctccggcttgtccatcggattggaagcaaacccctgcatgaacggcatcgcgtccgcatccacgccataggtgcgccccaggaacagggcgtggcgcacgtaatccgtcaccgggaaattccaccagatgaacgccggccgctgcaaatacttgttgatccccttcaaggccggggtccggatatcgctcacgatgctggacccggtccacatgatgccgatgtccttgtccagatgttcccccatcacctcgtggtagcggccacctccgccggaatacgccgtggggcacacgatcagcggagtcacgtctggcttcttgtggataaactccttgttcaggtaattcaggaactccacctggccttccggtttggcgccctccccgccgatgtcgtcaaaaaacacggcaaaggagcggaaccccaggtcatacatcatctcaaacttcttcacggcggctttccggtccgcctccccccagtgaatgtccgctccggggtgcaccgcccagacaaaattcaccttgttctgcttcgcgaccttcaccagctctttcaggtccttcgccatgtccgcgggatacggctcgcgccaacgcttggaaaaaccgtggaacacgtcgtccttcgggccgtagatgtaagtattcatcttgtacttcccgtaaaacttgaactggctgatgcgtccttcctgcccccagggcaggccgtaaaagccttcaatggtgccgcggaagggaacgtccggccagtccagaacctccaccacaggcaccgttacgccggaaggagtcttctccgccagttgaagcagcgtctgggccgcgtaaaacaggccttcgtcgtcatagcccgtcatccggatgccctgctgcgtgacgctcagggaataagccccggccttctgcggaacattcccggcggcctttttgcttcccttgatgatggacatctgcacgggcagcccgttcggagcgatggaaaacatgctcttcagcgcattcacggtaggttcgtcccgcgctcccgacagcttcagggccggaaccgtcacggaaccgccgctcctggtcatcttctgcgggatgggatacaccggcatcttggccgtttttttggcgcgggaggccgcaggcgcggaggaagaggccggagaagaggactgggcgaacaccggaagggcaaggccggctcccagcgccgtaaccgccatcatggatcggaaggaaatcaagttcatatgtgcaaaagtaaaaagcctgtacaggacaagtccacgaaactacggaccaatcgccccacttctaacagggcgctccccgtatgtcaaattacttcgccccattcgggaagttgcctcttccggggataagtcattcaggaatccggttgttcccgcaaacaccgccggattcccaacccggctctccgtttccctccttcatgcccggttccacatcgcgacggccgccgctggaggagcagctcccgggacgggaaaagcgggaatgtgctaaaacacgggaacgaccgggcagacagccggggacggcacgccatcaagagttgcaaaagaacggcctcccctattcttcacgattgaagaatccggaaatatcgaaatagacgaccagctccttgccttttttcgtcctgatcgtgaccaggtcataatacttgcctccttccttgacgagcgcctgcttgagcttttcgtaatttccgtacttcttcttgagccatttccgttcggcaggaacgccatccatcgaacttttcgctccggcaatcacgacggccttctcaaagctggagccgtctccgccctgataggtaatgcgggtggccgcttctcttttttccagccgctcgggcatggccggctctgcggttttggcagcggcgcacaggccaggaaacaacgcaatcaataacaggggtagcaagggtttcatcctattggatagataagaaatattcattcccttgtaaagctttctttttgaagcaggaacatccatcattacatcccggcggccggaacacggggagggctgacagggcagtcctgagcaatcactcccaagcttacagccacgccgctacttcttccaacgcctccacacgggctgtggcgagagtcgggacatcttccgcggaaaaaaggaaattccgccccactccggcggcaagcgcagcgcgaatgtctcgctcccggtcacccacggacacgcaagccgccatatccagtccatgggcggcggcggctttcaaaaacaggccgggattcggcttccggtcaggatggccgtcatccacgctgggacagtggaacacatccgctatctccgctccggcggcgctgaacgcgcctttcatatgctccgtcagccgggtgaaatccccttccgtaaacatgccgcggcctatgccggactggttggtcaccaccagcaccagataccccttctccttcgcccggcggcaaaggtccagaataccgggaaccagctgaaaatcctcaatgcggtgcacgtagccgccgtccacattgaccacgccgtcccggtccagaaacagagccttagctgccatacatttcctgctcaaccagctcgcagaccagatggcccacggcaatgtgcatctcctggatattgttcgtggcatcggaaggaacggcaatgcagaaatccgccacggttttcatctccccgccgccctggcccgtcagggccacggtcctgacgcccatgcggcgcgccagctccatcgccaggacgatgttctggctattgccactcgtggaaagccccaccaacaggtcaccggaacggcctaatccctgcaattgcctggaaaagaccgtttcatacccgtaatcattccctacggcggtcaggatggaagtatccaccgtcagggccagcgcattcatggcgggacggttcagcttgtagcggcccaccagctcggcggccaggtgctgggaatccgcggcggagcctccgttgccgcagaacatgatcttgttcccggccttgagggtatccgcgcagacgcgggcgacctgttcaatctctccggccatggcggccagagccttgaaattatccgctattcctaaaatctgattcctgatgtactcgctcattccggactgttcttcatgcggttgatgatattggtggaggaaaagccctccaggcggggaagctcaagagcctgtcccccgtaagatgtgacgtactgcccttccggccagcgttccagaggatagccctccttggcgatcacgtccgggcgcaacttctcaatcaacggcagcgccgtatcctcgtcaaacggcaccacgtaatcgataaaatccagggaggccagcagcagggaacgcatctcctcattattgatcggcctgtcctctcccttcaaccgcttgatggaggcgtccgtattcagccccacgaaaagcacgtcgcacgcttcccgcgccttcatgaaggaatgcaggtgccccaggtgcagcaggtcaaaacaaccgtttgtaaaccccaccaccttcttctcccgtcggaaacgctccgccagctccgccgcggcttccggcgtcagaatattgttccggtgatgccaggaggatgccttgagggccttctcctccagcgccttcttcagctccgctccggtcacgctggccgttccgaacttgcccaccacgattccggcggccacgttggacaccaccagggcctccggcaccgtagctccggccgccagcgccgcgcccaggctggcgagggaggtatcccccgctccggacacgtcaaaaacctcacgggcctccgtgggaatgcagacaaaatcggaaggattggaggaaggaatgaaaatcatgccgtgctcgctcagggtgacgagcaaattctcaatgccgaactcggaaaacagccgttgcgcccctgcgatggcatccctttcccagcctgtcgcggaaggattcagcgtcaccccggtcgcctcctggaactccttcatattgggcttcaccagcgtggcccccttgtaacgggagtaatccgaacccttcggatccacaatcacggacttgcccgccgcacagcaccgggcgatcacgtcaggggttgtctgcccgtcaaacagccctttcccgtaatcggacaaaagaacaaggtcggcctccggcaggcaggcgtccacccgttccagaaaacgggaggccagctccggaaccatccgcagcggctgttcctggtccgccctcagcaaatggtgcttccccgccacaaaacggaccttcacggtcgtctcatacccttcgcactccaccagctccggaacgcagcacgtctcttccagaaaacgccttacctgccgtccatggccgtcattccccaccacgctgacgaaggtggtgcggcatcccagtgcgcacaggttggtcaccacgttgcccgcgccgcccagcatgcgcgtctcccggtccatcttcatgatgggaaccggagcctccggggaaatccggctgacgctcccgtacagaaacttgtccagcattacgtcaccgatgcagagaatccgcacgcggggaaatccgtcaatcaatgtatgcagccgattcatgggagacgttcctttctaccatgccccataccgtaaggcaaggacagttgaagcccgttccggagccggaaaacggcgcaagacaggctgtcccctccgccccgggcaccggaacccttctttcagaggcaaaaaatgggtcagccatgataaaaatcttgacctgtaagcaggaaagcactacgtattgtctcccgttcccggacgaatagaaaaaggaaaacaaatcatgcgtgaagttaccgtaagaaaaggtgaacctatcgaccgcgctcttaagcgcctcaaaacaaaactggatgttgaaggcattctggatgaaatgcgccgccgccgcgcctttgaaaccccgatggacgaacgccgccgcaaggcccgttccgccagcaagcgcaacaaggtaaaatggcgttacagcaacaagagcgaagaagccgctcccgaaaccgctgaagctcccgcttccgctcctgaagcttaaatcagtattggttcgggaatagaacccatttcaatgagggcaaccctttctcaaggtttgccctttttgcttccctcagcacatgaatcaatccgcccagctcttctcccgcgcgcgcgccgtcatccccggcggcgtcaactcccccgtcagagccttccgcaacgtggacggcgaccctttctttgtccaatccgccaagggagcctacatcactgacgcggacggacgccagctcattgactacatcggcacctggggcccggccattctgggccacgctccgcagaccgttctgaacgccgtccatgccgccgtggacagggggctgggctacggcatccccgcgccggcggaggtggacatggcggaaatgattacgggcatggtgccctccgtggaaaaagtgcgcatggtcaactccggaacggaagcgaccatgtccgccatcaggctggcgcgcggctacaccggacgccgcaaaatcatcaaattcatcggctgctaccacggccatgtggactccctgctggtggcggcgggctccggggcgctcaccttcggagaaccggacagcgcaggcgtacccagggaaatgacccagctcaccattacggtgccctacaacgaccgggaagcggtgaaaaaagcctttgaactccatgggagcgacatcgccgccgtcatcctggagcccttcccggccaacgcagggctttacttcccgcagaacgattttctccattttctgcgggaaatcacgctccggcacgattccctgctcatctttgacgaagtcatgacgggcttccgcgtcgcgcccggcggcgtgcagcagcttcacggcatcactccggacctcacctgcatgggaaaggtcatcggcggcggcctccccgtgggggcctttggaggccgtgcggaaatcatggactgcctctccccgatcggccccgtgtaccaggcgggcaccctctccggcaaccccgtcgccatggcggcgggccttgcccagctccgggagctcctggacggaaacgcctacgaccgcctggaacagctcggcgcgcgtctggaagaaggcatccgcgaggccatccggaagcacggcaggaactacaccttccaccgcgcaggctccatgttctgcctcttcttcacggagcaggaagtctatgacctggactccgcgcaaaaagcctccaaggaactcttcaaacccttcttctggaacatgctggaacagggcgtctactttgccccctccccgtatgaaacgggcttcatctctacggcccatacggaagaagacattgaccgtacggtggaagcagtccatgtcagcctctccaaactgggataatgccccttatttgaagtgacaggccactttccttcccctataaggatgccatgagacaaatgacagggtccatgctgcttctgtccgcagcagccgtcgcagccgcccccctggcggatgcggaggaaaggacgatccagctcacggaagcggaaaaacaggaaatccaagcggcaaatgaaaagctgctgggacttaccctccgcttcctgcacgactcctggcccctggaaatcatgttcgccggagaggctcaacaggaatcccactccatcctccagtgctaccggatgctggagcaattccgggagactggcaacctcatgcttcaggctccggaccgcaacacgcccctgcacctctgcattgccctgggattgaatcaactggccatccggatgatagaagcgggcgctcccgtcaacgcccaatccatcttcatgcatgacggcactaaggaaccgggagacacccccctcacctgggcctgcctctcgggcctttacatgaactccacggcggaagacaggctgccgctggtgcagtccctgctcaagcacggggccgacccggaccagccgggaccgtggggcgtcaccccgttcatgtactccgccgccctcaatgactctgatccgggacaggaaaaaatagccctggccctgctggacgccggttctccggacctcaagcgcaggttaaacgcccaggcgcgcggagtcggcttcctcagcctttcccctgccatttacgaacggctcatcaaggcaggctgcgacgtcaacgaacgcttctttgaaagcaagcagtcccccctgcatctggtctgcaccaaggaaaaaccggcggaacgcctcatccccctcattgaacttctcatcaaggcgggagcggaccccaaccagccggacgtggacggcctgacgccgctgatggcctgcaactctccggagatagccgtttgcctcatggacaacggcgccaatcccgcccttcgcaacgatgacggccagaccgcctatgacttccacataaaaaacgggtatccccccattgcggaagccattaaagactggcaggccaaacagaaaaaagcaccgcgtaccgagtagcgccatcttcctttccagtgaaagcggaaaaaggggtctggccgttcccgtccgccatgggtctttcaagcgagccgcagcagagccttggcctgctcgttcctggattcatccccggacctctccggtacaaaagagaccttacgcaagccgcctcttccggtctttaaacacgcccggcatgctccttccggaaatgccggaagcccggaacagccaggtttccggagccatggagcaaacattttcctctggcggaacatgaaaaagccgcccccccggacggggaggcggctttgaaaaccacaggagggaagattattcttccgcttcaatgccttcaccgatcatcttgagatcttccggcatcttgcctgttgtgaagtagccttcgatttcctccagggaacggcccttggtttcaggcaggaagaaggtcaccgtaatgaagtacagcaccgtaatgccgcccagcgtaaagaacacgccggaatagccgcagcttcccacccacggaaggaaggaaccggcaatgatcgtggaaacaagctggttgatcagcagcgcaatcgccatgccgttggaacggatgcgggcgggcatcagttcggacagggccagccagacgcacacgccggggccagtggcataaaacgcgatgaagatgatgaagaaggcggtcacgccccagcccatggaggtatccggcttctcgcccagttccgccttcaggatggaaacgggcttcatggcatagccgtccttgccgttcaccaccatcttgttggtggaatccggaacggccttgatcacggccagggaagccttgtcctcttccttcttgatatccttggcatccttggtcagctcggaaaattccaccacggaaagctgggtggaagaacccatcaggaactggtaccaggcgggattggcttccggctggtcataggtgatgatgagctgcatcctgttgatgtccttgtcgcccatgccgttcttggcaagcaggttcttgacgaagggggaatcgggcgtgcgttccagctgcagcgtgcggatggagcctacgtccttgccctggtcaaactccttctggacggaagggctctgggcggccagcagggcggccacgtccgtggtcacgtccttgcgggctttttccacattattgaacaggaacccggtgccgagcagacccaccacaatgccggcagtgccgatcttgagcaggaacttgcggcccttgcggtccaccaggatcatggcgacgatggtcatcaagcagttcaccaccttgatggtgaagtccgcccagttggcggtggtgccttccaggccggcctgctggaacaccttcacggagtaattcagcacggagttgatacccgtggcctgcgtaaacgccaggacgaggaccgccagaacaaagggatacacatacttgcgctgaagaagggattcaccggaagaactctgcttcttgagctcttcagccttctgcttctcttcctcttcaatgtggaccatttcatcaaacacctccttggcgcgcacatctccataactgcgcaccagcacggccatggcttcatccttgcggccgcggcggaacaggtagcggggggattcactcaaacggaaggaaccgaaaaacaggaaaaggccgggaacggcgcaaacccagaaaatggcctgccacgcaaaaatcttggcggaagtcagcgtttcctcgctcgcgccggaattttccacgccgcccacataactggcggcaagcagaccgactacggcggcgaacaccaggcccaccgtcagcaggaactggaacatccccgtccctttgccacgggattccgcgctcaaacactcagccaggtacaggggaaccaccacgcctacaataccagcgctggcgccctggagaatacggcccagcagcatgatgccgaacacttcctgggacaggcagatcacgggaatactcaccgtgaacagggcggcggctacggtaatcagcgccttgcgtcccaacttgtccgccagatacccggcaaacagggaagaaagcacgctgccgaacagcacggccgccaccacctgggaaagctgggagggattgaaaccagccgtctgctcaatgtaggggagcgccgcagcaatcacgccgacgtccacaccgtagagcaggccgcccaaaccggccatgatgaggaggtagcgcatgtatcgcctggccgcatccggaacggcggccttcatgttttcttggtctgtcatggtcgttgcattctagtaaattggcttttctccgcaaccaaaaaagagacgcttccgggacaaaaacaactttcctcccctcaaatgcgcccaaatggtaaaaatatcacaaaagaaacaactaggaagccgtacaggaaaggaagatcgtttaaaatgactccaaaaacacctcttgccattttccccgcatcttcatgaaaaaacagccgcaaaagaaaaaaacgcggccgccttccctccggccccgtgaaccattcagctgaaaaaagagcggtgcgacgcgtcccaatcagaccgggcataaaaaacctcccgccctcttccggaaacggatgccgtccctactgggggttcttcgcggaagaatctatccccagccgcttttcaatcaggtttacggacagctccgcgcacaggcgcaattcgttgtcggcgtcatgggtgaaagcctttagcgcggacagggaagcctccgaaccgatttccccaagaatacgggcggcggaacgtttcagcacaaaatcgtccgactcgttcatcagccggataatgtcggcttccccggtgggaccgacggccttgcactcgtcctcccacttctggggatcctttttccattcatccagaagcagcgcaaagctcttcttctccggaccgtgcagcaaaaacctgaccagagaggcaggaatctcgcagtccgccttcttcaactccgtagccacatagtaaaccacgcgctgcgcctccgtgttatccggctccgcccacacgacgagggcggaagccaaagcggtcacatactccgcatcacgcccccacggctcccggagaagctccaccagcttggcggaaacttcatggcgcatcttgtccggcttcacggaagccagacgctttgccgcggcaatcacgcgccggatgtccagacaggacaattccttcaaattggccagtacgaaatactggtggcgttcatcctgcaacgcggcggaagccgggcgcgcttcaaacttgtcccggttcagaaccacttccacaaagaaatgctccttgtcctgcaaagtcacgttccccatcttggctaccacgtccacaaactccttaaacgtgatgggagtaggagtaataacgaacaagccgccgcccgtgcctttgcggtcataaaaaatcggctcgtcttcagactgggccatcctcttcaaatacgccttcaccatgtcccggttggccgcattcaccccgaccacccacacgcccagaacaccctgggcctctttccggtcaatggcggcaaacaggggcttcaaatccccttccccgtaattctgaacggaagcgttctgttcggccagttgttccaggctcatgctggtaaagccggagacgccttcctcctcctcagcctgggcgaccgcttccttcccgccgagcagggagggattcattttgaccggatacacgaaaggcagggaggcaatgccccccgccaccagaaagcccagcaaaatgaaaacaatcttgtgcctgcgtccggcgcaggccatcaagccccccgcaagacaggcgaaaaacagggcgaacgccttttgctgaggctgctgcagcatggaaaggaaaaaggtcccgtccatctcggaagaggcattgtaaaaaagccagacgcagccggcggcgatgaccagggaggcgcaaaggcacatcagttgaatcagccccgtttccatcaaggcgctctgaatggcctcccggcggtctttgggggtatgcacggtaacggccttcttcgccctggcaaaaggcttcttggggatcagcttttccctgtcgcaaagaaactcatggccgcatttgctgcaattcaccatggaaccctccgcagcggaaggaacattgatatgtcgtttgcactgtggacaattcagattcaccggagttcaatatgcacgtttttgattcttttgcaatacctgtctttcaaactttccttttgccggttattctgcataaattttcaaggatgtcccattgaactccagctcagccgctttcccgaaccatcctgttccacctcttttttcctgaactttaaatttaacctaggtatcttacatttaaaatattctataactgacaaccattcctcagaaccttgaacacaaggcgaagcggccgacaacattttttcctagtaaaagactggggattttttagccaaccttcatcagaaatccacattcccaaacattcctatatataaattatttaaattttataaccggtgccttccgggaaaagataaaaaactctctttatccgccgtattcctccccatgtcattccgagtgaacacgcttgcagagaaggaaatttggtagtagaattttcgccatgtcattgcagcctgccgaacgccgagatttcatccgcgatatgatttctgatgaccttgcctccggcaagcatcaggcaccggtaacccgctttcctccggaacccaatggttacctccatatcggacatgccaaatccatctgcctcaatttcggtatcgcccaggaatttccgggcgcgcgctgccacctgcgctttgacgacaccaaccccagcaaggaagaccaggaatatgtggacagcatccaggaagacatccgctggctgggcttcgactggggggacaatctcttttttgccagcaacatgttcgatttcttttacgaatgcgccgtcgccctcatcaacaagggactggcctacgtggacgaacagacggtggaggaaatacgcgcccagcgcggcaacgtgaacgtgcccggccaggaatccccctaccggaaccgttccgtggaagaaaacctggcacgctttcaggccatgaaaaacggggaaatcccggaaggaaaagccattctgcgcgccaaaatagacatggcctccagcaacatgaacatgcgggaccccgtgctgtaccgcatcatgttcgcggaacaccacaacacgggcggcacatggtgcatctatcccatgtacgacttcgcccacccgctggaggatgcctacgagcacatcacccactccctctgcacgctggaatttgaaaaccaccgtcccctgtacgactgggtgattgaaaactgccccgtgccggcacgcccgcgccagacggaattcgcccgcctcaacctcacctacaccgtcatgagcaagcgcaagctgctccagctggtgcaggaagggcacgtcagcggctgggacgatccccggatgcccaccgtctccggcatgcgccgccgcggctacacgcccgccgccatccgcaacttctgccagaccataggcatcaccaaattcaacggcttcacggacgtggccctgctggaatacagcgtaagggaagacctgaacgccaacgctccgcgccgcatggccgtgctcaatcccctcaaggtaaccatcactactctgccggaaggctcggaggaaatggcggaagtgctgaacaatccggaaaaaccggaggaaggaacccgccgtcttcccatcacccgggaagtctggattgaacgggacgacttcatgctggacccgcccaagaaatacttccgactggctcccggccgcacagtgcgcctccgcggcggctactgcatcacctgtacggactaccggcaggatgcggacggaaacatcacggaaatcttctgcgagcatatccccggcaccatcggctccaaccctccggaaggaatccagtgccgggcggccatccactgggtaagcaccagggacgccgtggacggtgaaatccgcatctacgaccgcctcttcacggaagaaaacccggatgccgcggaagaaggtttcctctccgtcatgaatcccagctccctgaccgtcatcacgaacgccaagctggaaccatccctggctgaagcggaacctgaattccgctgccagtttgaacgcctcggctactttgtggcggaccgcagggaccatgtaccgggcaaacgcgccgtcttcaaccgcaccgtggcccttaaggactcctgggccaaaaagcaaaaataacctcctctcctttcaccccctttatggacaaccaacttcaattctgcaccgttgacgaagccgtggaagaaatacggcagggacggatgatcatcgttacggacgaccccggtcgtgaaaacgaggctgacctcatcattgccgccgaattcgctacgacggaagccatcaacttcatggtcacccacgccaggggcctcgtctgcgccccgctttccccggaacgggcggacgccctccagctcccgctcatgacctccgtcaaccgggaaaacatgtccaccgccttcaccgtctctgtggatgcggcccatgacatcaccacgggcatcagcgccgcggaacgcgccctgaccatccgcacgctggcggaccccaaggccaccgtcaatgactttgtgcagccaggccataccttccctctccgagccgttcccggcggggtgctgcgccgcgccggccatacggaagccaccatcgacctcgtgcgcatggcggccctccagcctgccggcgtctgctgtgaaatcatgaaggaagacggcaccatggcccgcaccggcgacctgggcggcttccagaaaaaacatggcctgaaagcctgcaccgtggcccagcttatcgaataccgccgggccaaggaaaagcagatacgcctggtggaaaccgtcaagatgcccacggactacggcgacttcatttgccacctctatgaatcccatctggacggagcccttcacctggccctggtgcacggggaaatctccccggacaagcccacgctggtgcgcgtgcacagcgaatgccttacgggggacgtcttcggctcccgccggtgcgactgcggcagccagctccacaccgccatgcgccgcattgcgcaggaaggcggcgtgctcctctacctgcgccaggaaggccgcggcatcggcctggcggcaaaactcaaggcctacaagctccaggaacaggggctggacactgtggaagccaacctcaagctcggctacccggacgaccttcgcgactacggcatcggcgcccagattctgcatgacctgggagcggaccaattgcgcctgctcaccaacaacccccggaaaatcgtggggctggaaggcttcggcattaaaatcacggaacaggttcccctcgtcatcccccccaacgaacaaaacagcaaatacctggctaccaaaaaatgcaagctgggccacatcctgtaaactcccactccatcccatccctccatgtccacggaacttccacgccgccagcgcgccacgggcacgcgcgccaaaatcagcatcgtcgcctcggaatacaatgagcaatacacccaggccctggtagacaactgctcggaagaactggaagccgtgctccccgcagtccggctggaaatcatccgcgtaccgggagcctttgaaatcccggtcaccatcaaatccgttctctcccgctctccggaaaaacgcccggacgccgtggtggccctgggagtcatcctgcgcggcagcacggaccacgcggacctcatcgggtccaccatcacgcaggccctgatgcggctcgcgctggaattcaccacgcccgtcattcatgaagtccttctcctgaacgatgaaaagcaggcctttgcccgctgcatcgcctcccagctcaaccgcggccgggaagcggcccgcaccgcagcccgcatggcggaactcttcctcaactccctctcccggcaataaggcacatcctccctctctcttctctaccgccatgctctcacgcaaccaaatcagacaagcagccctccaatacctctacgccacctcccagactccggaagaggagcaggaacaggacgaaggcatctgggacatcctgatggaacccttccgcggggactactgcaagctcagggccaaggccgtctccggccacctgacccgggactatccggacaagctgcgcctcttcgtcacccgtgcgcgggaaacggcggacaagcttcagcacgaccccctcaccctgcccgtccgcgacctgctccaggacctgctggtcaaggaaggggaattcaacgcctccctgctccaactgaaaaaaaacctgtacgaagacccctccaatgacaaaggcgcgctttccgccgcctgtgacgccgcgcaggaactcaacaccaccctgatgcagatgcgccgccgcctgctggatgccctcaaggacttccctgcctacaacggcatctgggctccccttgtttcctcctgcaacaagctccaggaaatcaacgaccgcatcaactgcctcatccacccggacggccgcccctccctggcggaaatgaaaaaagtggtggaagccggaaaggatgcggatgaactctaccgtgaagccaaagccctgggagaagacattctgcgccgccgggacgaactggacgccgccatcaacggcaccctggaaaactactctccggaacgcgtcagcgccattgaccgcgccatcctgcgcctgggcgcctacgaactccttcaccgcaaagacctggccgcccccatcgtcatctcggaagccatccgcctggcggaacgcttctcctccgcggaatccccccgcttcgtcaacggcgtgctggccggcatctcaaaaacggaacgcccggcgtaaccactaccctgtaccatggctggattctttaaaaaactcttcaccaaattctcccgcggttcccggatagactgggatgaactggaagcggacctggttactgcggacatcggcatccggcgcgccatgaacattgcggaccaactgagggaaagcaagggactggatgcggaaaacctggtggaagccacccgtgaagtcctccgccaggcctttcctgctaccgctccgtccctgcccgctcctccggagggaaagccgctggtcattctggtcgtaggcgtcaacggcacgggaaaaaccacctccgccgccaaactgggccacctgctgcaaaaacagggctcccgcgttctcctggccgcggcggacaccttccgtgccgccgccgtggaacagctccagagctgggcggacaagctgggaattcccatctacaagggagcgcccaaccaggacccggcctccgtttgctatgaggctcacactcaggccatccgggaaggcttccaataccttatctgcgataccgcggggcgcctgcacacgcgccacaaccttatggaggaactctccaaaatccgccgcaccctcgccaagcaagatgcagcggccccccaccgcaccctgctggtggtggacgccaccacgggcgcgaacgccctggcccaggccagggaattccacaaggccactcccctggactccgtcattatcaccaagatggatggctccggaaaaggcggcgtggccgtagccatcatggatgaaatgcacatctcccctgcctttctgggaaccggggaaggagctgaagactttgaacccttcaaccgggaccgctacgtggattccctgctgtaacgggtccgttcaaccccatgccctctcttcccctcattactgcccagacggaggaaaagctgctcgccttcctgacggaacgcggccacaccaaattccgtgcccagcaggtcctggactgggtatggcgcaaacgcgtcacctcctttgacgcgatgaccaaccttcccccggcgctcagaaacctgctgtcggaaaacttccgtttccacacaccggaaatcgtggaagtccacggctctgcggacaccacacggaaattcctgaccagaatggaagacggcagtctggtggaatccgtcatcattcccgccgccgctgcggaaaacggggaacaggcggaccgcatcaccctctgcgtttcctcccaggtgggctgcgccttcggctgcaaattctgcgcctccggcctgctgggcctcaaacgcaacctcacgaccggggaaatcatcgggcaaatcctctctgcggaaaccatcgccggaaaacgggtcaacaacctcgtcttcatgggcatgggggaaccgctctccaacttcgacaacctggaggacgccctggaaatcatcacctcccaccgcgggctggaaataggcgcgcgccacatcaccatctccacgtcaggctttgttcccggcctgaaaaaactggccgcctatcccaggcaaatccgtctggccgtctccctgcacggagccacggacgaggtgcgcgaccagatcatgccagtcaacaaaaaatggcccctctcccagctcattcccgcgttggaggaatgggggaaggacaggaaccagatgcccacgctggaatacatcctcatccgggacgtgaacgactccctgaacgacgcatcccatctcgtccggatcgccaagcgcctgcatgccaaggtcaacctcattccatacaacactgtggaggggctcccatgggaacgccctgcggagagccgctgccgcgccttccgggacgccgtccacaaggcgcgcatccccgttaccatgcggtatgaaaaaggccatgacatcaacgccgcctgcggccagttgagactgaggaaggaacgggaaaacaacggtggaacgtccctctgacggaacgaggcttttctgaatttacgacgttgcctattgcccgccgcccttcgttgtgctattcctttccagccggatgccacccatcccgccgccgcatcatggaaactacggaaaccatcaccgccgcctccccgctggaactgaccaaggccccccgcaaagccccggccctggacctcagggacattccgcaggctcctggcccggaaaaaggcgtgctggccctcatggccatggaccccgccacctacgtgggccagtgcgtgaccatcggcatgacggaggactacttctacctgcccgcgcataaactgctctggcgcctcttccagacccgttacaataaaaacgagcccatcgacatcgtttccatcacccaggccctggaagacatgcaccaattggaagcggtgggcggaagcgcgggcctggcagaaatctacaccttcaccaccaccggagcctactttgagcactacctcaacgtcctgaaggacaaattcattctccgctccatcattgacatcgccacccggtccaccacccaggcctttgacaatccggacgacgtggcggaactgctggactccgtggaaacccacatcttccagatacgggaacgctacaacagcgccaaggacgaacaaagcctggcaagcatcctcaagcaggctgtcaccaactttgaaaaattcattgccagcaagggacagatccaggggctgaccacgggttttgaagaactggacaaaaaaagcaacggcctcaagcctggggacatgttcatcatcgccgcccgtccctccatgggtaaaacctccttcctgctcaacatcgtcgagcacattgcgctgaatgaaaaaaagcccactctgctcttctcctgtgaaatgcccgcggtccagatcgtggaacgccttctcttcgcccgctccggggtccgcagccgggaaatcatcaagaggggcaacctcacccagcttgaaatgaagcacttcaagcaggcggtcaaggaagtgggggcctcccagcttgtcattgacgacacggctgccatctccatcaacgaactccgggccaaggcgcgccgcgtcatgcgggaccagggcggcctggccgccatcggcgtggactacctccagctcatgcgctcccactccaagcaggccgccaacagccgcgaacgagaagtggcggaaatctccgccggcctcaaggccctggcgaaggaactcaaagtgcccgtcatcgtcctggcccagctcaaccgcggaccggaaagccgtacgggcgccagcctgggcgtgccccgcatctccgacctgcgtgaatccggctccatcgaacaggatgccgacatgatcgggctactctaccgctccgcctactatgcggaagatgaggaaaaacgccagcagatggccggacgggccaacctgcacctggctaaaaaccgcaacggccccaccggggacgtgccgctccactttgaagcggaactcatgcgcttctccacccgtgaagcggatgaacacgaccaggaaaacgaataaaatcccttccgagcttcaaatttctgcggatttacaatccgtcacggtctgaaaccggagaaatgtccatctccttacagggagtaccgcataccttgcggcaattgaaatacgtgtgcccgtcaggacgtaccggcttccaggaaagagagttcgctaacgctccctttcaaattcaaatgccgcagaagcctgcggcattcctcgccccagtccgacagctcccgacgggtccccatctcttataaacagctcctcataggcggaggggcgtcatcgcaagttcttttcccttagaatcacagcttgactccggattgtaaatccggtagcctcattgcagcgccagcgtctcttctgggcttacttatcaagtcatttctgttttaatatgaaaaaaaccttatctatcgccgccctgctctgcggattgtgcgtttgcgccaatgccgccagcatggtcacggaatggaccggtggggccggccctacggaaggcaacacctatgaactgggcaacgcgggcaactggagcaacggcattcccagccgcggcaacggccagggcccggatgtcatcttcaacaatgccggaaccgtcaacgtcaacggcgccatggtggacacctccgacggcggcggcatcaccgttacgggcaacagcaacgttaccgtcggcggcacccgctatacggggaatgtaacggtcggctccggttccaccctgaacctcgggcaagtggacttcaaaagcagtgacatcacccttgacggaaccctcaacctcaccgtctgcggcattgatcccggcggcaatggcgcacggcttgtcttcggtattggaggcatcatgaacgtcaaccagaaaatctggggcgcgtccagcttctccgtctccggactgctggccaccacatccacggacctgactgtgggagaattccagttcgttacccgcacgctggtcacctccgccggttttgacggcgggtccatctccctgggggactttaccgctgaagacggcagcgcgctgaccaaggcctccggcctcatggaaggaaatgcagcggactatcagggccaatactacctctacacggaaaacggagacgtcaaggtgcaatacgtagtagcgggcgtcgtgccggaacccgccacggctaccctcagcctgctggggctggcagctctgatgctgcgccgcaggcgcgcctgatttccggaatcccattttttcttcaagaggctgtacgctaatgcgtacagcctcttttgcattcgccgggcgggtgacggaaacgtcacggaaaatatcttcacgccattgccggaggccgtaacatctttccattaccctttattcagcattatgcaagctcacgcaaaatcactcaacgagcgcttccgcacactcatctcactcctcttcggcctggctatcggctgcgccctgctctttggagaatcccggtgggaaatgtccccgctcatagaagaaagcctcatgctcctggcctgtttcatggccggcataggcgccttcgggcgcatctggtgctccctctacattgctggttataaaaacaacgtccttgtcattgaagggccgtactccatgtgccgcaacccgctttacttcttcagcttcatcggcggcataggcgtagcgtgcgccacggaaaccttcacggtccccctgctgacggcattggccttcggcatttactacccgtccatcatcaggaaggaacaggaacggctcatctcactcttcggagacgcctaccggaactactgccggagcgtcccctccttcattccctccctatcgcggctgaagccgccgcccgcaacctactccgttaatcctgccaccttcacgcacaacatcgtggacgcgctgtggttcatctggttcatcggcatctttgaattcatcagcgggctacatgaagccggagtgctccctgtgtggttcctcattccgtaacctgctcccttcttctggcgtccagaagccccgccagggccttctgggaaaccatctgccggaaagaccctcggtcccgcggataaagcatcatctccgtccgcgtctctctcccccggaaagcccaggcgagccatacggtacccacaggtttttccggcgtgccgcctcccggccccgcaatgccgctgacggcaaccgccacaccggcaccggaacggtccagggcccccttcgccatcgctttcaccacgggttcgcttaccgctccgtgaagcttcaggatatcctccggcacccccagcatcttcgtctttgcccggtcggcgtaagtcacccagccgaactcaaaaacgccggaggaacccggcacatccgtaatcctcttggcaatcaggccgccggtgcagctttccgccgtcgccaccttcaacccctgttccgccagatggagcaccaccgccttctccagggatactcccgcgggagtcagcatatacgctcctgccaggatgcgcaggcgcgcctccccctgtttcagcgccacttcactgcccaccaggcgcacatccacctctccgatgcgcgcgcaatacgccacctccagtccctccacctggtgcagggaatcatccaccagctcctgaaggtcgctctccccgattcctaccagccggaaaacgcgcagatgtggaatatcctcatccgccagatcttccagaagcggcatcactgactgctccaccatcggtttcaactccgacggaggtccgggcagcaggatgaacatgggaagggaaccgctggcaggcatcaccaggccgggcgccgtgccgttggaattctccagcaccgcggcgccgtccggaaccatggcctgtttgaaattgcattccgcaatggaaatccccctgcgttcaaaatagctcttcaacctctccgccacctgctcgtcacgatgcatgtccacgccgcacacgtcgcacagggcttctctggtcacatcgtcgctcgtcggtcccaggcctccgctcacaatcacgatatccgcccgccgggcgctctccctcatggcctcgttaatggcatagccatcgggaaccacggtctccctctccacacggaatccggcctcaaacagcctgttgcccagccacgcggcattcgtattcacaatgctccccagtaaaatttccgtcccggtgttgatcaattcaaccctgatctgcttcatgccgccagtatgctcccgcatccgctccgtgacatgcaacaatcctgccatgtaccacaaaaaacttcatttgaacgtcccgtaagatacagtatgggcactgacaaagaccatgagcacaccttcccggccccgcgccaccaaaatcatctgcaccattggaccagcaacagacacttccgacatgctgggccagcttattgaagccggagccaacgttttccggctcaacatgagccactccaaacacgactgggtccgggaagtcgtcttccgcatccgccggaaagccgcagagctgcaggcgaacatagccattctctttgacctccaggggccgtccatccgcaccggggacctgcccgaaccctaccatctgaaaaaaggggacacgctggaaatccgcctgagcacggccaagccggaactccccttctccaccacggtgaactatgacgggctcctgcaggacgtccaggtaggccatacgatggtggtggacaacggaggcattctcatgcgcattgaggaagtgcgcccggacaggctcatctgcaaggtgctcacggaaggagtattcggctcccgccgccacatcaacctccccggcgtggccctgcggctccccgccctgacggaaaaagacctggcggacctggccgtagccgtggaatgcgagacggactacgtagccatgtccttcgtccgggacgccgcccacattgcccagctccgggagcatatcgacaaccttggaggaagggcccagattgtcgccaaaatcgaggaccagcaggccatccgccacattgacgacatcatcctggctgcagacgtcatcatggtcgcgcgcggcgatctgggcattgaagtcagcattgaggaacttcccatcatccagcgccgcattattcgccactgccacaggctggggcgccgctgcatcgtcgccacgcacatgctggaatccatgatcacgcagcccacccccacccgtgcggaagtcacggacgtttccaacgccatctttgaacaggcggacgccgtcatgctctccggagaaacctccgtaggccattatcccgtgcgctgcgtggaggtcctggactccatcgcgcaccgcatggagcgctccggcaaccttaactttgccgcctccgccatcctgaacggagacaggcagaaggccaccaaggcagccatctccctggcggactccgtggaaaacgcctgcatggtcatcttcacccgccgcggcctggccgccacgcaggcagccgtcctcaggccggaacgggcccccatcttcgccttcagcaatgaccccgttgtcgtccggcagctcgcgctggcacgcgacgtgaccgcctttgaatcccccttcctgaaagacccggcccgcatgatctccaccgctctgaacctgctgaaggaaaaagggcttatcacctccggccagcccgtcgtcatccagggggacagcctgcaaggggaactgctggcggactccatcatcttcatgcgcgcggaatgatggcccctgccttccatgtggcgcaggaaacagccgtgtggcctccgccccctcccctcagggaacttctgctggatgccgatccggacgaacggcaggtagcggaccatctggcccacggcgaactttacgtcgcacggagccgcggagctgccgccggagctatcgtcatccggcaaacgggggaagacacatgggaaatcatgaactgttccgtagcccctgaatacagaaggcacggttgcggaaccgctctggtgctgcacgccctgcacatcatcaggaacaagggggcaagatatgcggaactgggaacgtgcgatgcctccccgggcccaatggccctgtatgaaagctgtggcttccggatttcaggcgtcgtcaaaaaccactttacggacaactacccggaacccgtctgggacaacggcgtgcagtgcattgacatgatccgcatgcgtgcggacctcttcccgcaggagggggaaacacctccaactggtcagaagctataaaccaggctgacgcccgtcacccagctattgcccttcaccagcgttctcccatacacccggttcactccgtgggctcccttgccgagccagtgcagccccacaaacggctccacaaaaatattcccgaacaaacggtaattcgccgtcaccctgacgtacagggactgccaaccgttgctgccggaaggccagtaggaggaactcagcaccgcgccgaacttgaaacccatgtaaaggttttccgtcatccggaaatccgacccggtgcacatgtcaaaccaccagcccgtaatgccgtaaaaggaataagcggcgcttccctgcgcataaaaaccgggcaggaagcccagatcatggcgcagaatcagcgccgtttcatacgttgtcccaccgttgccgaacaaatgttcggaggcaaaccccgccaaaccgccgtcattcgcacggaaggataatgcggcgtaagtggccttcccgaacttcctttgaagcccaagatcagccattgtctcattctccaagtcaaccgccggatgccccaggaaaatttcctccttcaacgccagaatcagggaataccggtcattcaggtcgcttctccagtccagacgcaagggggccgtgggattacagccgccgggaatcaggccgcggaattcgtaattcgtggaatagcccgccttcaagctgccgctcacgggtctcagaggcggatcggaaggaacatccggaatgcgtgactccgccagggaaattgaaatggaaacggccagaaccgccccaagagcagaaaaaaaggaaaaactcataaacttggaactcctgttccgcggcattctgaataaaaatactgcctctggcaacaagcaaaaaaggagcggagcaattctcctttaccccggaaagtcaattcctccgcaagccgctcatcctgcaaggaataaaaaaatccggccctgccgctgccccaaattttccagccagtgcagcagcagccatatccgtgacggcttttcctaagccatcaccggccggaacaggaacaatggccggatcttagtccccgccttaatcggcaatttctccttcctccatccggaacatgaaagaaaaagagcggcggattgctccgccgctcttgaaacatgattcaatcgtaagccggacggcttagaaggaatagacgaggttggcgccagccaccacgccgaagttcttgtaaggcttggaacctgcgtccacgcccttgttagccttcaaggcgccgttgccggcccagttgaagctgacgaagggaaccacggccagattcttcacgcccagcttgacaggcagttcagccttcacccaccaagcttgcgcgccgttggacatgaaagcggacttgctgtcgaagtagccggcagtggcagacatgccgcccgtgatcacgatgtccgtggcggggcagatggaagccttccagcccacatacggctggaaccaccatccggtcattccctggaagccatagctagtggtcacaccggcgaaccagttgctgcacaggtcatagttcaggttcagatagaattcctgagccacggagtgggcatgacgctggccaacgacgccgtttgcaaggaggttgctgtaatcatacttggcaaagttgccgagcagaccgccatgaatcagattccagccgagggtggtggacaggttcttcagcaaaccgtcctggttcttccagccaaggttgaaattggtttcattgtggaaagcaatatctttcatgccaagcagctcgtgaccggaggtcagggaggtgtaggaagcggcacccacaatggagttggcgtcgctcagcttgtaattcagatttacaccggcagggataacgctatcccctcccaccaaggcgtgggaagccacgatgccgcggctggtgtaattggaggcataaccggcgtagatatcgccggacagcgggctgacagtcgccacgggagtgggaaccggagtcggagcaacaatcttgacgggagtgcccgcaagagcagcgccggcaaaggatgccacagctgccgcaacactgatgatgttcttggtttgcatgactattacttggttagggtattaattgttgatttgctaacaaggaaagaaaagtatcttttcccccttgttaaggaaagtgaaacatttccgtcacaaatgtaaagccttttctcccccacagttagctaatcattgattttctaacatttatatttaccatccccatgacaaaaagagcaatcttccagatcttgccaagctttcctctccatggccgggcaggatacaggcattccgccccggccaggcgttcgtcttccttcagggaaggagaaggattcaccaggaccctttgtccgcaggaaagcagcatgggcatatccgcgccactgtcgctgtaggcggcggcgttatccagaacgccgtgctccggcagcaccttccgctcgcgcaggcgctccacctttatctgtcccttgttgttgccgttcggcaattccggcatcgccggcatgcggccgtccagaagcacgtccgttcccagaacgccgtcaaatcccagcagctcacccagaggttccgcgtaaaaggttggggaggcggaaaccatgaggcacagatcccccttcttccggtgttcctccagccgttccttcagttccggataaatccattcctgtgccagagagccgaatttccttccatactcccgcaccgtttctgcggggagtccccacaaataaatgagataggccctcttcatccggttttcatcccatatcctcagaacataaagaggaatgcaggccaggaaaagaagcaccagcaggcgccgccatggatggagcctcagcacgaaacaggaaaaaacgtattgcgtatcccagggcagcaatgttccgtccatatcaaaaagggccactcccctttcgctcaaatcatccgtcatacccccatcctatactctcaaccctcaactctcaaccctcaactctccatcctcttcccttaaacgcccaaaaccccggccgccaaaaggcaaccggggttttgaagcaaatccagaaggaaataagattaacgggagtagaattccacgatgagctgctcattgacgatgggagcaatctcttccttggaaggtacgcgagcaatcttgcccgtgagcttgtcacggtcgcattccagccaatccggaaccacagtggcctgggtcaggtcaaggaaacgggtagccagctgctgggaggaggcctttccaccgacggcgatcacatcgccagggcggcaggagtaggacgcaacgttcgtctttttgccgttcacggtgatatggccgtgggaaacgagctgacgggcgccggcgcgggtgttgctgaaaccgagacggtacacaacattgtccagacggagttcaaggagctgaagcaggatgtcgccggtaatgccgcggcggcgggcggcttctgcataatacttgcggaactggccttcaagcacaccgtattggaaacgcagcttctgcttttcagcaagcatcacgccgtagtcggacttcttcttgcggccggcgcgcatgccatgctggccgggggggaaggggcgcttttcaagagccttggtggaaccgaaaagagcaacgccaaaacggcgggacactttatcgcggggaccggtataacgagccatgatatatttgatctataggtaaaaggattcaattagacgcggcgggccttcgggggacggcagccgttgtggggaatgggggtcacgtccttgatggaggtgatttcaataccgatcgtctgcacggcacgcacggcggattcacgaccggaacccggtcccttcacacgcacttccacttcacgcagaccgtggcccatggcctggcggcaggcgtcctggcaaaccacctggccggcgtaagccgtgctcttgcgggagcccttgaagcccatcttgccggcggaggaccagccgatcacgttgccgcgctggtcggtgacggtcacgacggtgttgttgaacgtggaggaaacatgaaccacgccggaggaaacgttcttgctgcccttggccttcaggattttgggcttgtcatcatcgccgcccagaccgagttccgcaaaaatgtccttgcggggttcgggcttcttgacttcttcaggagcggaaacagcggcggccggagtttcagcagcgggagcgggagctgccgcttccacgggctttttggcggtttcgttggtgatttcttcgctagccatagtaaagctatatagtaaaattcaggttgccggattacttcttcttggcctgcgcgccaacggtcttcttcttgcctttacgggtgcgggcattcgtgcgggtacgctggccacggaccggaaggccgcggcggtggcgctgaccgcgatagcagttgatggaggtcagacgcttgagaatggattgcttttcacgacgaaggtcaccttcaatcaggattccgtcagtggtgatcacttgaacaatcttcgtgagttgttcgtcggtaagctgtcccgtacggatgtcgggattgatgcctgcttgttccaggattctcttagaagtcgagtgcccgattccgtaaatatacggaagggaagcctcgatgcgcttctcgttgggtatttctgtaccgaaaaggcgtgccataatggattggatttgctagctgttatttttctctgcctcgcgcagagctattgcttggggcaagatggataccataaattgaggttttgacaagagcaaaacgtcattttttctatttttaatctcttgcgccgcttgaacatgcatgccgcccgtggcggcgcaggatgcgttccaccgcccaggaagcatgctccgccacgaggggggactccccggaaagcgccttcagaaaatcaatgtcatccggagttcccgcattccccagcacaatgcagccgttgcgcagcagcccctccctcttgattcttttcaggggggaatcccggaacaggtccgcaaagccgccggcatccagggcaagcagatcgcgcagcggaatggaggccagcaggcgggacatgcggaaccgctcatccgcctccggcaggggcttcccgttccaggggcagaccgtcacgcaggtgtcgcacccgtacagccgtgtccctaccagggggcgtatttcctccggaatggatccccggtgttcaatcgtccagtaggaaaggcagcgtccggcatccacctggccgttttccatgattgcgcccgtcgggcacaggtccgcacagcgccggcagcttccgcacccgtgggagaccggagtgtccggctccagctccagcgtggtcagcagggtggcgatgaaaaagcgcgagcctcccttcctgcgaacgatcaggccgcttcttccgcgccatcccaggccgcacgcttccgcgtggtcccgttccatgacgggtccggcgtccacatatcccttttgctcgccaccgtaaatggaaagcagttcctgcaaatccgccagcttctcttccagaattccgtggtagtcccttccgtgggcgtaaaggcagatgcttccctccccctccggacgcatggcggggctgtcatagtcataggacaggcagatgacggaacggcagccggaaagcacctccgcagggtccgccctccgctccggagaacgcgccatccattccatcccggcgtgccagccccgttccagccattggaacaatttttccgcatgcgggctccttcccgcacgggccacccggcagccggaaaacccaagctgccgggacacggcgcacagggaatctttaataacagcgggatccggcgtcagcacgcccgcatcatggacaagagcgccccttccaccaagaattttcttcaatccggtggaaattggattgcctgcaccctgccgccgcttcataatagacctatatgaacatccggattctgagcgatgggaaacagggccatctcaaccagtccctgggactggcgcaggctctgattgccaaagcagggggggccgtggaaacggtggacctgcagggactttcccttctggggaaaatccggaaggtcgtctccggcagcgacacgccgcagccggacctgttcatctccgccggacacgccacgcacatcccgctcatctgcgcccgccatcatttcaagacccgggctgtcctctgcatgaagcccacgcttccctgcaccttttttgacctctgcctcattccccgccatgacttgcgccccgggcgcgactatacggatacgggcatctttcccacccatggagcgcttcaccccatgaggcctgatccctccatcccgaaggacatcaccctgatcctcatcggaggtcccagcaaggattttgactgggatgacgaagccatgctcaaccagctctcggacatcagcatcaacacccccggcaacatcgtgctgaccacctcgcgccggacgccgacgggctttgcagagaaaatccagacggccgttccggagatcaccgtcgttccagtggaggaaacgcagccggggtgggtagcgcggcatctggcgcacgcctccgccacctgggtcagccaggacagcgtctccatggtatatgaagcgctgggcgcgggcgcgcccgtaggcgtcctggctgtcccccgccgccacggcaaccgtaaatcccgcatcctgtccggcctggaaatgctggaaaaggaaggcttggtcaccggataccgggactggaaaaagcagggcttccgcctggcagcgcccggagccccccttctggaggcggaccgcgccgcagactacatcctcaccagattctttccccaactccacgccttatgaaaatagtacatctcgtcccctccatggaatccggaggcgtggaacaagtcgtcatggaactgggcagcggcctttccgcccggggcgtggaaaacatcgtcgtctccggcggcggacgcctggttccccggctggaaaaggaaggctcccgccacatcctgatgccgatcggcaaaaaaagcctcgccaccttcttccgcatcggcgccctccgcgccttgctccaggccgtcaggccggacatcctgcatcttcattcccgcgttcccgcctgggtaggctacctggcatggaaaaaactgccgccggaagacagacccggcctcgtcaccagcgtgcacggcttctactccgtcaaccggtactccgccatcatgagccggggggaaggggtgattgccgtttccaactgcatccgggactacatcctcacccattatccgtccactcccgaggaccatatcagaatcattcccaatgccatttccccagaccagcaccacccggactactccccttcccgggaatggctcacgggctggcatatgtcctatcccgagctcaagggaaaattcaccctgtgcctgccaggccgcatcacgcgcctgaaagggcagctggacctgattcccattgtaagacagcttctggaacggggaattccggcccacgccgtcatcgtgggagagaccaaaaagggaaaggaagaatataaaaacgaagtcctccgggaaattgagcgggccggcgtctcccacgccttcacctggaccggccaccgccaggacctgcgggacatcatttccacttgttccgtcactctttccctgaccaaaagcccggaggccttcggcaaatcaacccttgaggcgctcgccctgggcagacccgttgccgggtacgcccacggcggagtcaaggaacaactggacgccttcctgccggaaggaaacatcgccgtgggggacgcttcctccatggctgccctgctttcccgctggtacgcccagccccctcccctgccccgtcacataccctccccttacaagatggaggatatgattcaggcccatctggacgtttaccaggaactgaccccttattcatgacgccccgggaagccgccataaccctgaacctgataccggggctgggccctgtcagggtcatgcgcctcatgcaggtattcgcctctccggaactggttctggaagctccggcctccatgctgatggatattcccggcatcggggcacagctggctcgccacatctcatcctggcggagcatcgtcaatccgtaccgggagctggaactggcggataaggcgggggccacggtcaccacggtctttgacgcctcctatcccgccgccctgcgcgagctgacggacgcgcccatcgtcctttattcctggggatcctggaccgcgggggattccgaacgctccatcgccgtcgtcggttcacgcatggccacccactacggcaggctatgcgccagaaccgtctctcatgacctggcggaggccggggtaaccgtcatttccggactggcgcgcggcgtggatacggaggcccatacgggagccctggatgcggggggacgcaccgtcgccgtcatcggagcgggcctcagcaagctgtatccatgggaaaacagaaacctggcgcagcgcattgcggacggccatggagcggtagtctccgaattcccgatggagctgcccccctcccgcaccacctttcccatgcgcaaccgcatcgtgagcggctggagccgcgcgacgctggtggtggaagcctccggacgcagcggagccctgatcacggcgcggacggcaggggaacagggacgggaggtcttctgcattcccggcccggttgaccggcattcctccgacggctgccacgccctcatccgggacggagccacgctggccgccggagcctccgacatcctgcatgacatgaaatggaccgccccggaacagggtctgccccttttttccccatcctccctttccgccgctgcacctccgctgcctcccactgcggaggaaaaggaaatcctccatgccgtcaggatgggcttcaataccattgacaccctctgcgcctcactggggaaaccggcatgcgccattacgccgcttctgtccagaatgcaaattgcagggcaaatcacgccggatgcaggcggatacttttccatcaaccacaagggacactaaacagttctcctccctttccggaaatgtctcaacagcaggcagggcgcccccggacggcggcagcccgcgtcagcccggttaaaggaacagaaaaagctcctactgcttaacctccttgcgcacggcatcaatccaggcggaaatcgtctccgcctgctcccacttgactggggcggccagcttcttcttggacacgggatcggaaacttcaaaaatcactccatatacaaacttgatgtcgtccgggtttcttttcttctgaaagcggccttcctgctgggccttgaaatctatcttttcataggacgccaggaaaagcgccagcatcaagccgtcctctcccttgatcggagaaacgagcggcaccaccgggcatttcacctccttgccccggataatggtcttgaccagcctcggttccaccttcttcaaaatatcaagcttctttgaaatattctccttggcaaatgccttttcaaaaacggccaggttactgtaatcgttcttgtcccggaagggaatcattgcctccatgctgttctccccgtccagcagcttcacttcaacgcacgtttccttctgctccatggacacggaggacttggcgctgtcagcgcatctcttggtatcaaaagagggcgtcttgaacggaagaacttcggcgcaggccatgcaggaggctaccagtgacaaaaacaggacggaaactttcatgatgattcaaatttatggtaaggaaccataatcgtctatgctccgcaatgacttttttctttgcttccgggctgcttccggcaaaaaaaactttcttctcatgatgcaaaacaaataccctcaaacatctaaaacagccgtcaagctacctcctaacagttattattccagaaattaaatatgtcaacaagggaagatccctcgcgcttcaaggcctgcggaagaactctcatgcctgcaacagacagtacatgcagggccaaaaccccataacgtgtttatattaatgcaaacataaaaacatgcagaaatatttcttaaaaaaataaccgtttacggacatattttgaacatctttttgcgggataaagtctcacccttcacaagatctatccgacgggtgggaaaagtaactcaaaatccgtccagggtggtttttggttccataggtagttaatagagagaaaaggccgcggatcaaacaacccgcggcctttttttgtccaactccctttcaaatgcggagtttgggcttgatgaatgaaacttcttactgtagcaacaagacatgcgtttgttcgcccttctcgcaggattcaccctttgcctgagctccacgagctgccaatcgtatggggattcaagtgattacatccccctggcaacgcccgttcccccgcagctttcccagccggtagccaacgcccttccccgccccgccaactttcccacgcgtccggtagccattccgccgagcgccccccgcacgccccgctgtgccagcgcctgcgtcatggacgccctcaccggaaaagtgcttttctcccacaacggactccagcaccgccaagtagccagcacgcagaaactcgtgacggccatggtcgtccttgaacacggcagcctggacaggaaggtggttatccagccttccgacaccaaggcggatcccaccaagctgggcttccgcgccggagaagtctattcccgccgggaactgctcaatgccctgatgatccgcagcttcaatgacgtagccgtggccctggcccgcgacacggcggggtccgttccccgtttcgcccagttgatgaacgccaaggcgcgccagatgggcatgtacaactcccgcttcgtcaaccccaacggtctccccgcggaccagtactccaccgctattgacatggcccgctgcgcctattacgtctaccgcaatccggaactgcgcaacatcatctgcaaacgccagtacgccttcacccgcgccaacggcaagacgcttctgctgagaaacaccaacaagctgctcacccagcacccgtgggtcaccggcatgaaaaccggctacacgaacgccgccggccgctgcctggtttcctccgccggcttcaacggccgccatgtcatcgtcgtcgttctcggctgccatccgtcccgcatctgggcggaatctgaaaacctgctcaaatgggccctgggtgacgccgcataaatgcacggcggcaattggtatttgactttcacggcgtgagccgctatcagtcctgcctatgttacaggcaggtattgtaggtctccccaacgtcggcaagtccaccctcttcaacgcggtcaccagaacccgcaaggcccaggcggccaattatcccttctgcaccattgatccgaacgtgggcatggtcacggtgccggactcccgcctgcaagtgctttccgacatgtccggctctgaaaaaatcatccccacgctcattgaattcgtggacattgccggcctggtcaagggcgcctcggaaggagccggactgggcaaccagttcctggcgaatatccgtgaagtggacgccatcgtgcaggtggtgcgctgctttgacaatgacgacatcatccacgagcttggttccgtggaccccctgcgcgacattgaaatcatcaattcggagctcattctggcggacatcgccaccatggacaaaaggctttcctcccgggagcgcaaggcccgcagcggagacaaggaagccaaggcggaggtggccctcatcaccaagctgctgccccacctgaatgagggcaatccggccctcacctttgaatcgcaactggatgacgacgaacgcaagctgctccattccttccagctcctttcggacaaaaaaagcatctttgcctgcaacgtcaatgaagacgaactggcggacgccatcaacaatccggacgcgcacccctacgtctcccaggtgaaaaaatacgtggcggaacaccacaacgcggaggccattgtcatctccgcccggattgaagaagaactcatcgacgtttcggatgaagaagcccgcgaattcctggaatccctgggcgtgcaggattccggcgtttccgacctcatccgcgccgtgtaccaccttctgggcctgcgcacctacctcaccacaggagtcaaggaaacgcgggcctggaccatcccggccggggccaaggccccccaggcggcgggcgtcatccacacggattttgaacgcggcttcatcgctgcggaagtggtgcattacgacgacctggtatcctgcggcggcaaggccggagcgcgggagcacggcaagctgcgcattgaaggaaaggaatatgtcgtcaaggacggagacgtggtcgaattccgcttcaatgtttagcccaaagctttaccggaattccattgacttttcctgatgcagagagcagattgctcataaccttcacatcgcctcatgactgatcccgacgtcaaatccacccctttggcagccaagcacgttgaactgggagccagaatggttcccttcgccggctggaacatgccggtgcagtacaccggcatcctggacgaacacaaagccgtgcgcgaagcctgcggcatctttgacatctcccacatgggccagttcacggtggccggcgccgcagcggctgcatggctgaactccatgctgaccaatgacatcaataaactggacatcggccaggggcaatactccatcatgctcaatgaccgggccggagtcattgatgacctcatcctgtaccggatggagccggaaaccttcttcgtggtggtgaacgcctccaagattgacgaagacttcgcgtggctctccgcccacaagcccgcggacgtggtcctggaaaaccattccgacgaatatgtgggcctggccgtccagggccccaaatgcggagaaatcttcgcccgcgtcattcccggcgtggagctccccccccgcaacggcatctcccgcatcacggtggacggaacggacctcctcgtctgccgcaccggctataccggggaagacggctttgaattcttctgtccggcccgggaaggcgtcaaatggtttgaagccttccttgacgcaggcgccaagccctgcggcctgggcgcgcgcgacagcctgcgcctggaaatgtgctatcctctgaacggttccgacctcgctccggacaaaacgcctctggaagccgggctcggcttcttctgcgcgctggatacggacttcaccggcgccgacattcttcgtgaacagaaagccaacggcctcacccagcgcctggtggctattgaatacaccggcaagggagctcctccccgcgcccactatgccgttcacgttcccggaggagaagccatcggagaacttaccagcggcgtgctctctccttcactgatgaagggcattgccctggcctacctgcctgtcgcccatgccaaggtcggcaccgagctggaaattgacgtaaggggaaggaaattccctgccgtggtagttaaaaaacccttttataagaaaggttgacactacggcgcaaaaataaactgacaaacactgcattttactacactctcacctcaaacaattacatcttatgcacgacgtaccagaaaatctgctgtattccaaggatcacgaatggattgaaattgacggggacatcggcaccatcggcatctcagaccatgcacaggccgaactctccgatgtagtctttgtagaccttcccgaagtaggcgccaccgttgccgccggcgaccccgtcgccgtcgtggaatccgtcaaggccgccagtgacgtgtacaccccggtttccggtgaaatcctggaagtgaatgaagaactttccaatgatccctccctcatcaactccgatccctacggagcaggctggctgtacaaaatccgcctggacgttcccacggaaacggaagacatgatgaacgccacggactacgaggaatactgttcctgacccgttcctccctcccccgccccggtgattccatcccggggcattttgaatttaacccggcccccgcggccgggctccattacctgccagataccacatgaatacccactcagactttgccagacggcacatcggcccccagggggaagaacgccgggagatgcttgacagcctcggctaccaaactcttgatgaactcattgcggacatcgttcccgcagacatccggatgcaggatcccctggacctgcccgcagccaaatcggaaacggaagccctggaggaactccgttccatcctccggaaaaacaagcttctgaaaaccttcatcggccagggctactacggcaccatcacgccctccgtcatcctgcgcaacgtactggaaaatcccggctggtatacggcctacacgccctatcagccggaaatcgcccagggacgcctggaaatgctcatgaacttccagaccatggtctcctccctgacgggcctgccggtggcgaacgcctccctgctggatgaaggcaccgccgccgcggaagccgtcaccatgtgccggaacgcgcgccccaaggcaaacaccttctttgtggcggacacctgccacccccagaccatcagcgtcatccgcacccgcgccgccttccagggcgtcaacatcctggtgggggactggacctcctttgaccccgcctccgtcggcgcggatctagccggggcgctcgtccagtatccggacacgctcggccgcatctgcgactacacggacttcttctcccgcgtgcatgccacgggcgcgctctgcgtcgtggcggcggacctgatggccctcaccgtcatccgggaacccggcgccttcggggctgacatctgcattggcaacacgcagcgtttcggcgttccgatgggcttcggcggcccccacgccgcctacatgtcctgcacggacgccctgaagcgccgcatgcccggccgcctcatcggcatgtccatagacacccagggccgcccggcctaccgcctggccctgcaaacgcgggaacagcacatccgccgcgacaaggccacctccaacatctgcaccgcccaggtgcttctggccgtgctggccgctttctacgccgtataccacgggaaggaaggcctcaagcgcatcggcacggaaatccaccggaaaaccaaaagcctgtacaaggcgctcacgaacgccggcatcaccattgaaaacaaggacttctttgataccctgctgctgaccgtccccggccaggcggacgccatggtccggaaagccctggaagcgggttacaacatccgcaaggtggatgccggccacgtcaccatttccctggatgaaaccgctacctgcgcagacgtagcggcgctggcctccgcccttgcgggcgcggaaacctccgccccctgctgctgcgagactcccgcctgggccccagtccatacgcgccagacgcccttctgcacggaaacggccttcaactcctaccattccgaaacggaaatgatgcgctacatccgccgtctggaatcacgggacctggccctgaacgaagccatgatccctctgggctcctgcacgatgaagctgaacgccgcttccgagatgatccccatcacgtggccggaaaccagctccctgcatccctttgttccggcggaccagtcggaaggcatccgggaaatgctctccgtcctgtccgaccgcctggcgaaaatcacgggctttgccgccgtctccctccaacccaacgcgggcgcggcgggggaatacgccggcctgctggccatccgccgctaccagaagcacgccggggaaggccaccgcgacgtctgcctcatcccgacctccgcccatggaacgaaccccgcttcctccgccatggcgggcctcaaggtggtgcccgtcaaatgtgacgaaggcggcaacatcgacatggaggacctgaaagcccaggcggaaacccaccgggacaacctctcctgcatcatggtcacctacccctccacgcacggggtgtatgaacagaccatcagggaactctgcgacatcgtccacgccaacggcggccaggtgtacatggacggcgccaacatgaacgcccaggtggggctgacctgccccggctgcatcggcgcggacgtctgccacctgaacctgcataaaaccttcgcgatgccgcacggcggcggcggtcccggcatcgggcccatcggcgtggcggaacacctcgttcccttcctgcccggccacctcacgctgggccatgaggaaggagctgtggcctccgcagcatggggaagcgcctccattgccgccatctgctggatgtacctgtccatgatgggaccggaaggcctcaaggaagtcacggaaatggctatcctgaacgccaactacatcgctaaaaaactcggccccctcttcccggtcctctactccggaaacaaggggctggtggcccatgaatgcatcctggatccgcgccagctcacccatgacgccggcctcaccgtggatgacatcgccaagcggctcatggactacggcttccacggccccaccatgtccttccctgttccgggaaccctgatggtggaacccacggaatcggaacccaaggaggaactggaccgcttcatcgaagccatggaacacattcatgcggagatcacggccgtcatcaacggcacggcggacaaggaagacaacgtcctgaaaaactccccccataccgcggaaatggtctccgccgacgaatggcggcacccctactcccgcagtgaggcggcctatccggtatccggcctgcgcatccataaattctggccgtacgtgggccgggtggacaacgtctacggggaccggaacctggtctgcacctgtgacacggtggaggaattctccaaagccgtggaagcgtaacgccaaatataacttttaacctagaaggggctgttccattcattggggacggccctttctatttccacagaacaagaccgctccttcgaggaaaatctcttccctgggcatcgcgccaccaacgggcaacccggacctcacttgataaactcaagtacaaaccgattgaccagctcgtgctgtttctccgttccgccccctcccatgccgctatgcgtaactccctccagcttcaccaccctcatatgaaactcctcctgctcctttataccgggcagcactccctcgtccgcctcataatcacatcccctcaaggtatacagccgcggtttccggattctcggcatcttcatcctgcggtgatccagggaaatggccttatcgaccaaaaggggatgcctggccgcaaaaagcatgaccatgtcccctccgtttgagtgccctatgagaataagctttccccaatccaatcccggtttcagcttcctgaactcctgaatggcaaacaggatattttccactcccctttcccaattcggcatgcgggcctccatcaaattcccttccattgccagaagcggatcctggggcaattcatgctgtatgctgattacataatacccctttcctgcaagaaaacggttcaaataggaatatgcctggctggatttgacgttcctgtttccgtcatagccatgattgaaaatgattacctttgtctcggagctttccttctccggctgataaacggttaccggaaccactctgttcctgccgccatcaaaaaggccaatggtgaattccatctgggagaagccatgggcagcgctttgaaccagcacaaccagtataacaaaaaaactgttcattttcaatgctgcaatcatgcagaaattcccttaaccggacgttccatcccggcctgttctccttcaatgcgtccagcttccggcttcattcttcaactccagggcggatcaccgtacttgttctctcccggcaggctctccccataacacaaatacatcaacagcagccagcccactacgggcacggccagccatatcaggaaaaggccgcttttccccacatcatgcaggcgccgcaccatcgtagccgccagggggagaaacaacacgggaagcaccacgtaagccaggggaaaaagcagctccaacaggggggacacggaaaaaaaaccgcttttcatgatggacggaacccctgccacgaccagccacgcgatgcccatggtggaataaacctcgcgcatctcctgttttccggcgcgtccttcaaaactgcaccatcccttaatgatgcgcgtccaatacttcttccgcgtccaggcgggaatggcgggctctcccccggtttcgagctccggcatggctgattcctccatatcggcatccatgacggtcatggagggaatgaaggaagacagcggctgccagcccccgtcgggaagcttcctcaccagggtacggttggacagccgcccatggttgcgagcctgaatcagaagcaccagagagacgggtcccttggaggaaccgtcaatcgcctggtactcgtaaaggtcgctcatcggaggttcttattcggccccgccgtcatggctgaacgcggacgcgggaatctcctgcttggacaagccggggccttgccacttcaagaccagcttggaggcgggaccggcattgcccacatagccgatgcggatgggatgcaacccggcctttaaataaacgggattcttccggtcgcccaaatcggaggaaacttcggagcccggttcgtaagtcttgtccgcatcaatcaattccatgccgtgcaggcggacaaaagccttgcttcccttattcgcatccgtggacagataaaaagtatactccccgtcagcgggcaccttcacgtaccccgtcaattccaccccgcgcttccggggcccgttcatcttgacggacggagacggggccacgccatgcgcggcagcctgcttcttgagctggcggaaatccggaacccaggggaactctccttcatagagggaccacttcaagccgggggaggcagccccttttgtctccactgccgggaccagcgccgtatcaaacaccgtcttggaaggaagggaggcacgccgattggacagggcagcggccttcatgcgggcctgaagctccggcttggaggaagcaaggtccttgctttcctgcggatcattcagggtatcgaaaatcatgaaatccttgtccgcgtccttcacccccatgcgcaggcctttcaggccgtccacaaagacgatctgctgctggccccgttccgctcccttgtgttcgcccaggaaatccttgtagccgggcgtcttgccgccgacgttatattcggaataaataatgccgggcttctgctggtccgcatggcctgtcagcgtcggcagcagggaaacgccgtcgctgcgggcgggaaccggcactccggcggcatccgccagcgtagccagccagtcatggaactgtccgggctggaggctgatctggcccttgggaatgcgggcgggccagcgtaccagcgtgggaacgcgcattccgccttcccagcagtcgcgcttgatgccgtccatcatgccgtaactcttgaaaaactgcggattctgcgccccatgcctgtgcttggggtcggcgccgccttcattgtgggggccattgtcggaggtaaagacaatcatcgtatcgttgtcgatcttcaaatccttcagcagatgaatcaaatccgccacggcatcatccacgcggcggatcatcgtggaatgccgtttggccacctcattcgggaagcgggcattgtccggataaatgtacgtgtccttgtctttttccgccttggcgtcaaaagccgtatttacggattccgtgccgttcttcttcacccactgcaggccgcctttcaaaccgccgccggaaggatagggcgttccgggaaccaccaggttgccgtgaggggccggaaaagccaggtacaggaaaaacggcttgccggtcttgcgggcggacttgcgctggtccacaatccattgcttggcgcgggcggcaaacaaatccgtggaataggcggtctggggaaccttgtccttgatattcttccattcgggattggaggcgtaaccgttgtactcgaaaatgtcgcgggactcggaaggataatggaaatgcccggccagatggtccaggatgccgtaaaaataattgaagccgcgctggtggggaccgcccgtcaccggaccatggctttcgccgccgccgcccacgccccacttgccgatggcggcggtatcataaccggcgtcacgcatcacggtgcccagcgtatgggaatcttcaatgggatggtcaaagcggttgttcctcaccacgcgggaattcccctggtgcacccccagcagcagggaggcgcgcgccggagcgcagaccggagcggcggaataatgccggcgcagttgaattccctcccgggccagcgcggacaaagccggggtcttgaactcgttcttcctgtccaccgtccgcccgttcagcttctgctggctccagttggaatccagatcgccccagcccatatcgtctaccagaataaaaataacattgggttttgaattcttgacggcccgggcggcgggcttcgcagcctgcccggaagcgctcatgcacggaaccagggcagtcagaagaacggataggaaagataccagcttcatgattcagatgaaaatagactctaggggaaacgttaaaacagagcgcgatcttacatgaattctcccatctctcaagataattaaacggaaagggaattgatgattgctgtatcaggcctatagtgaaaaaactatgaaactgccccatactctattgattgcatccgcccttctgcttccctccggtacgctctgcgggctggacgtgtgaatggctgacctggaaaaagccgccgcacaagccgaaaaagagaataaggacctgttcatcgtttacagggggggcgcctggaatccggaggcatacggcgtgccggaacggcagatcttccaaatctgcatggcagggcgccatttaaaaaaaggaactgtctgccggactggaaatgctgaaatccgccaggggcatggctccatggagcaaacacgccaacaaggcccacaccgatttcctgcgcatcccaggcaaccgggatacgctgcataggctgtggaagcagtacaaaaacggcgccgaggaggcggggaccgcctaccggaaaggcatcctcctgaatccggaccccgtgcccatggaactgaaactccagtaaagcagccgctcccgtggaaaaaaccgtttccggaaggacgcaagtaacgtgtccggaaccgcggaagcgtcagaaccgcttcttcctgtcgtccctgcgggggcggtcgccccagcgttcaccacggtcactgcggaagcctccgcggtttcccctgaatccgccgcggtcgctccggtcccggtctccgcggtagccgccgcggaaacctccgctgcggcggggtggacgcggcccgtcggaatattccggcgtgcccttgtcctcgcggacgttgacctcatacccgcagacggtggccgtagccagggcgtccaggagctggggagctacggaagcgtccacctcaatcagggaatgcttggggaaaatccggatatcgcccacggcgcccttctccatttccaccgtattgtaaaacaatccggcgatgtccttgggccgcaggccgatcatcttgccgccgttcatgaacagcgtgaccgtatcccccttgtgctgccaggaatctcccttttgcgggctctccgcctcttctccgggctgggatacatggcgcgtcctgcgggcgggcttgtcctccggaatgggctgtacttcccggtgcgtgcgctcccggagcaaatcaaacagggcggcggccatggcttccggagcggcttccacttccttcaattcctccggcagaacggcatccggcttgaggcgttccagaatatcatccaccagggattccgtccggagctggtccacctgaacggcggtcagcacgggttccggagtcagcttgacgccgatgaagcgttcaatgcggctcatcagggaaaaatcacggcgccccataaaagtgatggccttccccttgcgcccggcgcgcgccgtgcggccgatgcggtgcacgtaatcctccggatcacgcggcagttcaaaattcaccacggcatccacatcgtccacatccaggccgcgggcggcaatatccgtagccaccagcagacgcaggctccccttgcggaaggaatccatcacgcgctcccgcatgatctggggcatgtccccgtggagacggtccacgggataaccccgggccgtcaggccgtccacgatgtcgtccaccactttcttggtattggcaaaaaccaggcccatcttgatcttccccgtgtccagcaagcggctgagcacctcaatccgggaagaaaataccacctcataataagactgttcaatggtgggcaccgtcagcgtgggccgctcaatggtgatctggacggggtccttcatgaaccggttcaccagccggttgatttccggagacatggtggcggagaaaaacagggtctgcttcgtttccggcatgaactccgcaatacgttcaatatcttccagaaagcccatgtccagcatctcgtccgcttcatccagaatcagcatgcggagattgtccagcttcagcgcaccggactccatcaggtccatgacgcggccgggcgttcccaccacgaactggaccccgcgccgcagggcgtccaattgcgggcggaaggaggaaccgccataaatgggaacggcggaaacgccgtccatgaacagggccagcttgtccacctcccggcaaatctggacggccagttcccgcgtggggcaaagggccagcacctggacattccgctcctcgggatcaatgcactccagggccggaatggcaaaggcaagcgtctttccggaacccgtatgggacagccccacgatatcggaccctccgatcgcagcgggaatcgcctgctcctgaatggcggaaggagtatcgaagccgagcacttcaatggcttccagaatctccggcgaaatgccaagcgtcgaaaaagaagatgtttgagtcatgggggaaaaatgatctgtcagagtcacgggagaagctgaacattattcacacctgtgtccagccaaaagaacggaagatgccgttagatgccacgatttccgcggggccgcctgcggaggaaaaaaccgcctccccccgcttctggtctttacattcacacacggggttgcaacttgcggggacgcatctgcgtatgatacaagtacctgcctccgaattcatggataaaacgcaaaacaactcacgttcctccctgctgggaattttcatcaacatcctgctcccggtattgattctggactactgcagcgcgggccccgccaatcccctggaacgtccggcgggggaaagcttctggcacatcggcccggtatgggcgctcgttttcgccctttcccttcccctggtctatggaatccgttccctggtcgtcaccaggaaatttgacctgatgtccggcgtaggcatggccggcgtgctgctgacgggcgtcatcagcatcttcgtcatcgggccggaggggcgcatccacagcgccactccctggctgtttgccggaaaggaggccctgattcccctcatcctggcggcggcggtcgtcgtctcccgctccaccggctccccccttctcaacatgttcatttacacgccgaagctgtttgacgtgcgcaggatagaacaggcggtggccgccaacggcgaggaacagacctaccagcgcctgctggcaaactcgtcctggattctggcgggcacgctggttgcctcctccatcggcaacttcttcctgagcctctccttcatgtcctccgtcatgcgccagcctgaggcggaacagcaggtggcctacaacgtggccatcggcagcatcacctggtggggcttcctgatcatcggggtgcccatcctggtcgccctcgtcttcatcatgacgcgcctgatcaaacggctcggacggctgaccggcctcacacgggacgaactccttctcaaataacctgttaaatcatgcatctccatactccatgcatcctggctgccgccatcgccctgaatgcggcttgggcggccgctccccaattcgaccgggtattcggttcccacatggtccttccccacgggaaaaacgtgcccgtctccggcacggctgatcccaacaaggaagtgaccgtcaccttcggaagctcctccctgaaaacaaaggcggattccaagggaaaatggagcgtcaccctgccccccatgaaacccagcgcagagggacaaacgctgacggccacccagaacggagactcttccaagctggacgacgtgctggtgggagaagtgtggctggcctccgggcagtccaacatgctgttccgcctgaaccagacctccacggccaaggaagacatagccgcctccgcggacgagcagctccgcttgttcaacaacgtcccacaggcccacacgaacaacgccccctattccgacaaggattttgacgccgtcactacggacaaattctataaggggcagtgggccgtcagttcccccgccgcctcgggcccgatggcggccgtcggctactacttcggcaaaaaactccgtgaagggctcggcattccggtaggcatcatccattcctccctgggcggctcggaaatagcggcgtggattccccggcaggtcatcaatgccaacagcagcttccgcaccctgcgcggcaaccactggctggactcacccctcatctccgactgggtaaggggacgcgccagaaaaaacatctccccgcgtctggaccaggggtctccggaccatccctacaaaccggcgttcctttatgaatccggcatcgcgtggatgacagccctccccatcacgggcgtcatctggtaccagggcgaatccgacgctgaaatcattgacaacgaacagaacggcatgctgctgaaaaccatgatctcctcctggagaaaagccttccgcaatccggaaatgcccttcgtcatgattcagctcccccgcatcaacgatccgtcaaaaatccgtgccggctggccggaattccgggaaatgcaggacacggtagccaaaaccgtcccgcaggtctacagcgtcaacaccattgacctgggttccaccaacgccgatgtccacccccccttcaagcgtcccgtgggagaacgcgcggggaacacggcactcaacaaggtttacggcaaaaaggttccctgtgaaggcccctccttcaaagccttcaaaccctccggcagcgcccttctgatccaactggaacacgccaaagacctgaccacgacggacggcaaggaaccggcccagtttgaaattgccggggcggacggcgcttaccatcccgccacggcggaaatcacgaacaggaaaggcagcaccgctgtcatccgcctcacctccccggaggtcaaatcccccaaacacgcacggtactgctggaaccgcttcgtgacccccaacctggtcaacggcgaccagctccccgcccgccccttccgcacggatgcgcccactcctaaaaaataacccttctcactccaccataccatgaaccttcatcttctcttcgcttccctggccgcggccctttccctgggcaccgcggcacaggccgtccccaccaaagtagcctgcgtgggggacagcatcaccttcggctccggcctccaacccggagatgcccggtatccgcaggtgctcggcacgctgatgggcccggactttgacgtccggggattcggcaaccccggaaaaacggcgggcgactatccgggccaagtgggccgctggtacggcagcaccaaggaacacaagcaatccctggaattcaaggcggacgtttacatctgcaacctgggcatcaacgatacgggccgctggtgggaccccaagctgttcgccaagggttatgacgacctgttcaatgcctggaaatccgccaatcccaaggccagattcttcgcctggggcctgctgggtccggactaccgcggcccgctcaacaaaaaggcgttccccggcaactgctacccggatgtgcgcaaatacgcaggctcggacaacggctccgcggccaaccgtccggaagcggaaaaactgatcgccaccgtggcgcgcaagcacaaggtcggcctttttgacgcgctgcaccccctttccgatcatccggaatggtatgtggacggcctgcaccccacggagccgggcgcgcggcgcattgctgaaatcaccttcgccaagctggcaaaaagcatgaagctcaagcagcccgcccccaagctggaacctggcatcggcaacgtgattatcaacaattccggagactccggcatcctgctggacggctggaagctgacggacggctccaatacgctcgtctttgaaaacgctaccgtcatccaccccaaagacaggcttatcatcaccataggcgcggaaactcaaaaggacccgaccaagcccctggaaatcaaatccgccaaatccccctccgccttccgcctgattcccgcaaaaaagcattgaacaccccttgaaaaacctattgaagaggctgtctgccagcctcttcaataagaaacattatctccttctccacccgcgcgcggcagtgtctgccggcaggccggaaactgcggaaagtgcccggcttctcctcaaacggaacgtccgcgcagcaggccgcttcctcctggttccggatatttcatttcatcctattttatttgagcatttctgccgcacgaacggtctacagtgcatggaacagaataaatgcaaatcatccgcgtgctgcctgctgggctctttctccaccaacaccagcatggacttcggcgtcctattgctgcgcctgggcgtaggcgcgatgatgcttgtgcacggcatccccaagctgggaatgctcatcagcggaaactgggcggctttccaggacccgctgggaatcggcaacttcctgtccctgctgctgtgcgtaggcgcggaattcggatgttccatcctcatcttcctggggctcttcacccgcctggcctcccttctcctgatcatcaacatgtgcgtggctctcttcctcgtcctgggcctctccggctggggcgcacaggagctcgccgccatctatctgctgatttacctgaccctcttctacacgggaccgggcaaattctcgctggatgcctggtggctctggcgcgactgcaagatagaagtggaataaaaaggcttcctcctgcgcggcctatggcaaaaatacttcttttttcactcgccgcggcaggagccttcctttaggatgctggcacacccagtccatccgttcaatgtccggcaaactaacctacaagcaatcgggggtcgataccaaagaagcagccgctttcgtatccgacatcagctctcacgttaaaagaacgcaaaagcagagatccctgcaccaggccttcggtctttttgccgccgcctatgacctgagctcctacaaggaaccggtcatcgtcaccggatgcgacggcgtaggcaccaagacggaaatccttttcgaactggacatggtggaaaccgccggcaaggacctggtggccatgaacgtcaacgacatccttaccacgggcggagaccctcttcttttcctggactacctgggcatctccaatctggaacaggaacgtacccgcatcacccgcctggtggccggcatgtgcgactatctggaatcctgcaactgcatcctggccggcggagaaacggcggaaatgcccggcgtggttccggaatccatcgtggaactctccggcttctgcatcggatgctgtgaaaaaagcaagctgatcgaccccaagaccgttcgccccggagacgtattcatcggctacaaatccgacagcttccatgccaacggctggagccttatccgccgcattctggaggaaaacccggacgtggttgatgaagaggaactccgttccctgctacagcccacccgcctgtaccatgacgtggtggcggacatgcgccgcttcaacgtcatcccgaaggcatacgcccacatcacggggggcggccttccggaaaacctggaacgcttcctgggcgactacggcgcggacctcaccattccctgctgggacaacaccgcagcccagaaaatcctgaagcatgtggacccgcaggaccgcttcaacacctttaacatgggcatcggctgggtagccatcgtgaagccggaggacgtggaagccgcgctgaaggcaggccccggcggcaccgtcatcggcacgttgagagaaggccgcggcattcatgtcaaggtacagggcgaatagagaaggcaccatctccttgcagcggatacaccacacttacaggacaatcttttcatcacaatcccatgagcgattttcttaaacacgagtgcggcgtagccgccattcgtctgcttaagcctctctcttattttcaggataaatacggctccaccctctgggcgttcaacaagctgctcatcctgatggaaaagcagtacaaccgcggccaggatggcgcgggcatcggctgcgtgaaactgaacatgcccctcggccagccctacctgttccgcacccgggacgccagcaaggacgccctcaccaccatcttcaacgggcaaatcaagaagcttaacaaaaaagtccgccgcggtcaggtcaacctgaaagacgctgaagacattaaaaacaactttgactacggcggggaaatcctgatggggcacctccgctacggcacctccggcctctttgacgaaggctcctgccatccctacctgcgccgcaccaactggccgacgcgcaccctgatggtgctgggcaacttcaacatgaccaacacgccggaactgaaccagcgcatgattgagcgcggccagcatcccgtcttcggcacggacacgcagaccgtccttgaagaaatcggctaccatctggatgaagcccatacggacctttaccgcgccctgcgggacagcggcatgcccggcccggaaatcccccatgccatctcctcccggctcaacatccaggaaatcattcacaactcagccaggcagtgggacggcggctacgccatcatgggcgccatcggcaacggggactacttctgcctgcgggacccgcacggcatccgcccctgccactacctgattacggatgaattcattgccgtggcctctgaacgcgtcccgctgatgaccgtctttgaagtggaaagcgaacaggtgcaggaactgccgccggccaacatgctttccatcaaggcggacggcacgcacgtcatcacggaattcaccacgcccctgaaacccacgccgtgttcctttgaaaagatatacttctcccgcgggaacgaccccatcgtgtaccgggaacgcaaggccctgggcgcggcgctgaccccgcagatcgtggactccctggaagaccgctttgacaaatctgccatcacctacattcccaacacggcggaaaccgcctactacggcctgctggaaggcctgcgcgtctaccgccgcaagcgcgtgcacgcccagctactggaagccctgagaaacgggaccctggatgaaaacatgctggacagcgccatcctgaaacggtggccgcgcggtgaaaaaatcgcccacaaggacatcaagatgcgcaccttcatcacgcaggaaaagagccgcgcgcagcttgtctcccacgtatatgacctcacctacggggccgtgggaccggaagacgtgctcgtcgccattgacgactccatcgtccgcggcaccacgctgagaaggtccatcctccgcatcctgggccgcaccaatccgcggaaaatcgtcgtcgcctccaccgctccgcaaatccggtatccggactgctacggcattgacatgtccgaactggggaacttcatcgccttccaggcggcagtctccctgatcaagcagcacgggcaggcccggttgctggaagaagtatacaaggcatgcaaggaggaactgaccaagcccagggaagaacggcgcaactgcgtcaaggccatttacgaaggcttgacggacgctgaaatctcccgtgaaatcacccgcctggtcactccgcacgacgccccgtgccccgtggaagtcatcttccagaccatcgaaaacctgcacgaatccatagaaggcccctgcggcgactggtatttcaccggagactacccgactccgggcggatataccacagttaatgtggcatacatgcgctggtttgagggtaaaggggggcgtgcatacgatttgcccttgtagcgggtccctatttttgggtattctgctgctaatatgtcgggacccattgcatatacgaccttggaagacactgaactggtcgccagggcgcgggagggagattcgcgagcttttgacgaacttgtcattcgccacagccgcaagctccatgccaccctgtaccagatgacggacaactacgacgatgcctatgacatcgcccaggaagcgttctccaaagcctaccgggccttgcgctacttcaacggacaaagcgccttttatacatggctgcactccattgccgtcaaccatgccagaaacttcctgaaaaaacgcaaccgcaggatgacctacagcctggacgacgacgagtacggcgaccatacggaaaaggacatgaacatggctgacgaaacggacggagcggaccctgaacgacgcacccatctgaacgaacttcagctcaagattaatgaagcattgaaaaaactatccaccaagcacagagaagtcgttgtgcttcatgatgtaaaaggactcaaccacacggaaatatccgcccttctgggcatctctgaaggaacgctcagatcacgtctgcattatgcccacaaggagctgcaaggcctgctggcggaatatctgagttaacggtggaaaaaatattgaacatcggttccctccgccctgtcaaacgcatagtcccagattcgggactaaaacaccctaacctttattacacttaacatcaacgacgatggataaacaatccacagaacataacgaggaaactctggttgccatgctggcatctttccgtaaggaagcttgttaccatgacaactttgaagaagatttcctccgcaattttcatcttagaaaggaaaccgatccggctacccactctgcttggaaattgttactcgaacgcctggacaactatctgcagaactttcgtggctggcagtgggtctatgcttccatgtccatcgtgacattggctgcggtaggcgttattatcgcatccgggaacatggatgatccttccgactcttacgcatcctccaccaaggataaggaagagattctcctgaaggaaaaagcggttcccgtaagtaaggaaactattgaacaaccctcaaccgaagtcgcccctgcggaaaaacccgaattcaccacgggagcgccttcatatgaaacatcggccaacgacaatcagctgaaaactgattccaataccgataaaaaaccggtatcccgagttctcatcgagatgtaacaatccatgatgaacctggctccgatattggcgggcatagccgttgcaggcttgatttatcaagcggcggccgtgcctgccccttttaaggtagaagccattccccaccaggcggaaggagagccgtacacggccatggcggcgcaggtcggaaaagacatgctcgcctccctgattccctaccgggtctttaaaaacggcggtgtgacctactaccttggggacaaggacacccctccccttcaggtatgggcccaggaaaagctcacgggcctgacgattttcaaggtggacgctgcccgcatacacgacgggcaggcggttgtgacgccctccggccttctcaagcgcggcgacaagctggcctttgccagcagccggaatgaaaccaccctgggaatttacgtgggcatggagcactccataggagacaccagcttcccgctgcgtcttgtccgcgcccaattccccaaactggctgcgccgcccatcggccagccgtgctatgacgctgaaaaccgtctggtcggcatcgtgctgggagtttcccgcaagggaacctgccacctgctgcccgcccaggccatctccttcctggcagcccatccggaagccaagagggtgcgcctgggatgcctgctggatatcaacgcctccactcccgtcattgaaggcctcattaacggaggccctctcgcgcggggaggcatccagacaggagacatcctcatcagcatcaacggcacgaccattaacaactacggggacatgctggatgccacctattacctcacgggggaaaagcctctgaccgttgaagtcattcgcggcacccaggtggtaaaaagcaggggcatcatccccacgcaggactcccgttaatccggaaccccggctcccaagggaatgccggggttcggaacggtccttctcaaaatcggcccgtgccttgtttcaggcttgaactaacccgccggcgcacttaaaaaagggcgtgcttcaaatcgtcttcaataaaatcagcgctgcggaagtatccagcatccccaccctggaacaactggacctgctcggggacttccaggtctctgaatccaccctccaaacccttgatgacgcccgcttcggcaagatggaaaaggatggcaaaattctttaccgctacgtagccagggactaccgcatctactttgaagtcattgaaggcaaagtggtcgtccaccgcgttctgcacgccaacagcctgaacgactttctgttccgcaccaacatctccccgaccgcaggggaagatgaaatcctgagccagtccaaacacttctggaaactcattgacgaaggcaaaaaagcctccaaagcctgacccctccccacccatggcctgcatcattctgggcatcaccggctccattgccgcgtacaaggcggcggacatcgcttccgccctcgtcaaaagcgggcatgaggtgcactgcgtctgcacggccaaggccctggaattcgttacagccctcaccctgcacacgatctcccgcaatcccgtcttctcctcctttgaggatgaaaaggcggactgggttcccccgcacatccaactggcccagcgggcggaccttctgctcgtggcccccgccacggccaacaccatggccaacttcgcccacggcttcgccccggacatgctcagctccctctatctggcctgccaggccccggtgctcatctgtccggccatgaacgtccacatgtgggaacacacggccacgcagcaaaatgcggccgtcctgaaacaaagaaagggccactgcattctggggccctgtgaatccggcgtgctggcctgcggagcggaaggagcgggaaaactgatgccagtagacctgattgttcaaaaaacgctctccctcctgccgtaacggcggcataaaattactccatgcctgtttattggtttgccccgggagaactaaatcttttatcatggacattatgaaaatgctcctgttcttccttggctccctcatgctctgctcctgcggcccggacaagtatcccgtcagcttccacatggagacgggagcgacggacagcaaaaaattcgcctttgagcgggacgggcattactacagcaaggctcccttcatttcccagaaggacattgaatcctactactccttcccggcagaggacaatacctacggcattgtggtcaatgtcagaaaaggcctggacagccgggtagaaggagtaaccgccgccaacctcggcaagcagatactgccggtcgtcaacggtcatgccatgcagcctctgcgcctttacaacaaacccgttacctccggcaaactggccgtcatgggcggcttctccccggcggaccttgccgccatggcggaattcattcctccggcggaccccaagagggaagagcccatcaacaagctggccgccgtcaccaagccccttcttcccatcaaggaccccacccaggaaaagaaggaagccaaggagcccgaagaacataaggaccgcaccgtggtcagcacccgccgggggcggatctgatccagcaccccttgtatgagcatgcacggcaagttcttcccttccctgatcggcatcctcttgttcttctggagcatgccattcctgatggcggatattgtcgtgcgcttccccacggaaaacacggccttgctggacaaccgtccgcaggacttctacatgtacgtggaccggaactttgaagggaagaaatcccagccctgggaggcgggagcctacggctttacccggaccctcgtcagaacccaggcaggccccgtagccgtcaaattccatgaaggaatcgatatcaagccgctcaggcgcgacgcctccggcattccgctggacgacgtgcatcccgtagccggaggcaccgtggtccacgcttccgccaaccccacccacagcaactacggccgctatgtggtcatcgaacaccaattggcggacggcccgctttacagcctgtacgcccatctggcttccgtctcctgcaaggagggggaccgggtaggcaccggaaacgtcatcggaaaactgggctactccggagtgggcctgaacaaaacacgcgcccatgtgcatctggaactttgcctcaagctccaggacgactttgaaaactggtattccagcctgaaactgggtacccccaaccgccatggcgcctacaacggcctgaatctggccggttttgacccggcccccgccctcatgcagtgcaaggacggcgcggaattctccctctcccgccatatctcctccctgcccgttcagtacgtcgtacgcgctccatctaccggaagcctgcccaatcttgtcaaacgctaccccttcctgctgaaaccgggaccggccaatcccaagtcctgggaaatcagctttacgggaacgggagttcccgtttccgtgactccctccgaccaaccctgcacggaaccctccgtcatccgggctgttccccatcccttctcccaactgtacaggacctgcaaccgcgtttccggctccagcaaagatccgaagctgaccgcctccggcaaacgctacatccggctcatcttcatggggcctgaatcataatcctacgatgatgcacaccttcttcagtccccgtttttcccttgccgttcttacgtcctgcgcggcttttctgctcaccatggggggcactccccctgcagccgcggcaacacctcctccggaggctcccctctcgcaggacaggcaggccctcctgaaaaataaaaaataccagcagggtctgaaagccctggaagaccgcctgcccctggaagccagcaagcattttcaggaatgcctgaactccaaaaatcttccggaatcccagaaagccatcatccgccccttcctggcggaagccctgatccgcgccagaaaaacggaagaagggctgactgcctgggaacaacttccggactcctccatgaaatcatactggatggcggcgggcctctttaacaaaggctcctttaccagggccctggaaaaactctcctccattcctgaaacggacccgctctccctctacggcttccagctgaaagcccagctcgcgcgccagcttcaggaccggcagcttttactggatgccctcaccaggctggggcaggcggaatccaccgccatctcccggaccgcgcacgtccttctggcggacgttctggtgaacctggggcgctatgcggaggccgccgccattcttgaacaattcaagacgggaatggacgacggcacggccagggacctgcccatgcgctcttatgccgaactcgtggaaggcaaactggccgacaaacaggggaacctggaccaggccataaaaatcttcgccgccgtcatggacaacaaggcctatccggggaaaatccgggatctgggccgtctggccctcgccagggcggaaatcgtccgggagaaaaacaacccggaacaggcggaagaggaaacgcgcgcccagcctcaggaagaggaagccccacacactgccggaacggcggaagaacgcctgctggcgttcattggcggcaaatcggaatcctccctgctgatggacgccttcaacatcctgctggaggaggacatcttccgcaccaatccccaggcgctggaaaaactcaccggctgggtgaatgccagggatgcgggccgccagccggcagccatgtatgccatgggaagcctgcttctggcaaaggacgacctggcgggagctgtcaaaatggcggaggacggcctctccaaatatcctcagagccttcccgtccagaccctttccctgaataccatcaccactctgctggacaaaaaccgcgtggaagacgcggaacgccttatctccaaatatcccggaacgtcccccggcctcgtcttccagcagggagccctggccttccgcaagggagactaccctctggcgcagagcctcttccgggaagcagcccggcgcgcctctgaaaaaacggcggaaagcgccctgttcaatgaaaatctggctgcgctgaacgccaatgacgccgctggagccgccgccctggtcaaggaagccgccggctctgcccagctccgggaacacatcctctttgaacaggcccattacgccgccaaaagaatgaacccccaggctcccgaactgctggcgtccttcgtggcactggcgacagacccggccctgaaaacccaggcccggctggaccaggcggaagtggccctgaacctcaacccgccggaccttgaaaccgtgcaggccattcttccgccgctggaaaaagaacagctgactccggaacagaccatgcagcttgcgcggctgaacatcctggaggcggaaagccggcaggaatggcccagcgccatccaagcctgccgccaggccatcgccctggattcggaaggcaaacaggcggacatgctctatctcaagctgggggaactcctgtacaagaacggggatttccatgaagcgcagcttgtcctccagcccttcccctccaaataccctggcagccccctccaggcggcggccctcttcctggccggaaaagccgcccagcaaagcaacaccggcaatacgctgaaagccgccctgaacatcttcaaaaccctgggcgcgggggacaccccctttgcgcagcccgccaggatagaagaagcctccgtcctgctgcgcatgggagaagcggaccaatgcatcgccgctctggaaaacctgctttcctccccccttccgcgctacatgcgcctgctggccctctccatccaggcggacgcctgggtgacgaaggaagacacccattcggacaccctccgcaaggccatcaacctgtgcacggaaattctggacacccccaacctgggcctggcctggaaattcaaggccctcacccagcgggcccaattctacgaacggatgaacgaccagaaaaaggcgctggatgactacgcctccatcctggcccatacgcccagcggcagttccgccaacaagcgccgggactggcactggttctacaatgccggtttcgcctccatccgcctgctgggccagctccaggactgggacggcgccctggcgctggctaaaaaactggcgcagacctccggtcccagagccagggaagcggcggcctacgcgcgccgcatccagctggaacacttcatctggcaggatgaaccggaaaatgccgctccagaaaccggaaagccggaaacgccggctcaaaccgccagttaagccgccccctcccgtcatggacactccatctacagccaaaaactggagactcaacgcagcagccgtcatcatggacgccgacggctacgtgctgctgggcaaggacaacggccgcaacccgtactggcacttcccgcagggaggcgtcattaaaaatgaaagcattgaacgggcgctcgcgcgggaggtatgggaggaagtgggcctgcgtcccacggaatacaccattgtcagtcgcctccccggcctgcggtacaaatacccctccggcaaccgcaaagtcacgcgctggataggccaggagcaaacctacttcctggtgcgctgcaaggccaggcgccccaagacggacctgcaccgcagccctgaattctcaaaaacgaaatggatacccctccaggacctcaagctggagatgttccccaaattcaaaaggaaagtcatcaaggacgcccttcagcaattcttcgggccggattttccggccaaacccgccgccatgaaaacctcttccacctcctctcccgcttcttcaacgttaacttcgcatacaatgaaccgttacctggtgcctccgggcaaaaaactgcgtttaaaggattactctccggatgacaaatctctcttctccggaaccaaggaagaatccctggttgaattcgacaagctgagggaagaactgcaggaactgcagaaaaaactcttcgcccagcacaagcacagggttctcgtcattctgcaggccatggacgcaggcggcaaggacggatgcgtcaagcacgtcttttcccgggtggacccgcaggggctgcacgtggttccctttaaaaaacccactattgaagaactggaccacgacttcctgtggcgcgtgcacaaggaagtgcccgccaaggggcagatcgccatcttcaaccgttcccattacgaggacatcatcgccgtccgcgtgaaaaaaatcttcccggaccccgtctggaagcgacgttacaagcacgttctggattttgaatccatgcttgcggaagaaggcaccgtcatcatcaagctgttcctgaatatttccaaggcggaacagaaaagacggctggaatccaggctccaggatccggacaaactttggaagttctgcatggacgacctggatgaccggaaccgctgggacgaattccagacggcctatcaggatctcattgaaaaaacgtccactccggatgctccctggtacatcattccggcagaccggaaatggtacaggaacctcgtcgtcgcccgcctgatggtggaaaaactgcgccatctccagctcacgttccccactcccaacttcgatccggcgtccattatcattccagattgataaactctgtcataccgataactagtttgtgcatcataaaattatttttgtacatttctcggtattcaattgtcccattattacaaaatctgcattattcacaataacaatcaaaacttagaatttctaacgcttgactgggacagtgaaaaattgttagaaaacaacttaacacctagaacgtgtaaacattctatatagaaaaacagaacccaatgtatttagcatcccaacgtaaagagttcattctgaaaacgctggccgaacatggagccgcaagaaccattgctctggccaaacagatgaaggtcacggatgaaacggtccgtaatgatttgattaaccttgagaaacgcggctttctcaagcgcgtccacggcggcgctctggcccttacccataaatccctccatgaagacattgtcactcaagacgatgtttccataaggattgcaaaaaaagccgtccagaacatccccgcttccgtggtcatgttcattgacagcagcaccatgggctaccagatctgcaaccacattaattccagggatacgcacgtggtttccaacaaccccacgctgctgacccggcttgaaggcattccgaacctgagcttctactgcacgggcggacgcttcgaccgcgaagccctggtctatgtgggacaggaagccgccaaggccgcaggttccctgagcattgacatggttgtactgacgccggactgctactcccccaagcatggcgccggatacaagaacatgcttcaatccgaattcatcaagagcgtcattcccccggatgccaaggtgatcatcgccatgccttccaccagcgtagcgaacaacccggcattctataccgttgcgccctcacagatctccatgctcatcactgatgaagccctttctcctgaaatggctgaccagattgaaaagagcggcgtcaaggtggagctcgcctgacgccggcctgctttacagggggcggaagttcttcggaacttccgccttttttatgatgatcatatactctctcctttccattccgtccagtactcccggcttcctgtcagctcgtcatccctggagccgatctcctcaaatcctccacgcctgtagaacgcgcgggcacgggcgttctcctcgtaaacgcccaccgtcagcatccccttgctgtgctccttcacccagtccagcagagccgtgcctattccctcgcactgacgctccggcgccacaaacagagcggcttcttccccttcccccaccaggcaggcaaacccgacaacacggccgccgtccctgcacatccatgacccttacgattacttagggatgcacccttaccgtgatttatggccggtcacaccatttttgagctgataacagtttatacttgaccatcccctgaatttatctgaaaagaaaaatcgcttatttagtatttggaaatgagtaaaggtaggcttgtttcagaattgtataaataaacgaaaaacaccatagattttctgcaataaacatggaaaagattgctgcttccctgttggcgacagctggtattgcctgcgcccaaacatacaactacgattcctcctctgaaacgcttgtgataacaggcaagggcaatacggttgccgaccgcattactctggaaggaccaataacccccgggagcacagtccctgggacttcggaaatattcggagacacaaaagaaattatcttaaaagacgtttggacatctcccgattcgatccgcattaaatatgtggagccgacttctgagggaaacaacacgacgctgaaattagaaaattcgcgtttgggcgcatcgggggactttgataaaggcggcacggggttaatccttattttggattcccaatccagtcttgaactatacgggaaccggctcaccaacacaatcagaatcgaaaaccaaggcaacataagatgcacaaacggcactgtaagtgcaagctcgtatttgtgggacaacaagacaaccacaggttcttcaggcgttctgggcggaagtggatattatagcttcgggaacgtttcctctatcgagactaataaagatttcggactcatcaagaccagcggtcaaattacagacctcgaaatttcgggaatttacactgtggacgggaattccgcaaaaacaatcgacgacgactcctacatcgtgggtgtgaacacgtcgagcagttctgacgggcaggcgatgacgatttcgggttcacttacaatcaatgcaaaacaaggcacggggataggtatactggccaaccagctcggcagcgacgacgtttcgctcaaaaataactattcgggccaaatttacgtgacagcaaaagacgccttcggtgtaaaagttggtaaaaacgcggccaaggacccctctgctgcgggcgacatctactcgctttccgtgggcgaactcgacatcgaaagcacaatcacttcgggcagcacgcagggtgaagcaacgggtatatacgcaaaaagcgtcaagcgcgatttgacagcaaatgcaatcacagtaaaggggtacaccaatgcaaccggtatccatctgacggaaggcggccgcaacctcaccatatccgatatgcaagtaagcgcgggaatcagcggcaacgcagcaggcataatcgccgcgccaggcagagataaccctgtttccacagccggaaacctcgaaaacatcaggatagataatttggaggtttcaggcggcgcagatgccacgggtatctttgcaaactccattacaaaatcgggccaaaatgaaaacatcataggcaacattacggtttcgtctgaaaacggattggcaaacggtattttcgccgacaacgctgacatcaccctcggcggcaaaatcctatcctcaagcgaaaactccaacgcctacggaatttggacggaaaacgaccttttcttaaaaatgctcgatggttcggaaatctcggcaatcgctgcaaacgaaaactccagcgcccaggcaatccgctcgaaaaacctctatctgacattcgacggcagcgcgacgataaatggcgacctcatggcggacgccggcatggagctaaacaacggaggcaatgtagtcgtcaacggcaatatcgagggtaaacatcttgccgcagaatcaacaatcggcacggtttcaggcaaaatgaaattcgactcggttgccggcctgaacattaccgcatcagtgggttcgctcgaaatcggtacgtcgggcgaggattcggggtatattaaagtcaacacagtcgagacatcagcaaacatttcaaacgccgttttggtgacaatcgaaaacgcaaacggcaacgtctcgttcaactcggttaattcggcgacggtaaacaacgccgttggcgacatctcagcaacaaatgtcactaacggactgaacgtcggcgatgtcggcaacatccgcgtaagcggtacgaatgtcaatgtgcttgacggcaaaactgtgagcggcgacatcgtttcgacgacagacctcatactgtcaaacgaaggttcggcaacactcacgggttcagtttcggcgggcgggaacagacttacgataaacagtgtcttcggcataaactcttcagccgcgaccgtaatcagcgcggggacactcgggggcgcgggcttgcgcggcaccatcaacaaccactacgacaacatcttcggtttctccgcaaccgacgactcttcgggaagcctcaccgccgcaaccgccttgaaaggcacgcacgacgtcgtctcgaacaacatttcgggcatgatcgacggcgacttggatccttttgaaaacacctacatcaccgtgaagtacgtcaacgtcggcagcaatgtcggctacgaaatcaagaagaacacctatcttgccgaagcagttgcgacaaacagattcgaaaaggcgttggcaaaaacctacgacgatcttgaatacatcgacggcgacgacgcggcgaacgaggcggcagttaccaaaaaacgtaatttcgccgcaatggtaaaaagcggcacactgggtgcgatacttccgcagtcggtagtgcacagcgtgcgcatgaacatggatcttgccgacataatccacctcgacacgctcaaccgcacgagcgcggcaatcgacggcctcggcgcaaaaagcagcggcacggaagtttcgggggggcgtttttcaggcattaccgtccgcaacataaacaggtttgccacctacggcggcgatgaaaacatggatgggtcgagcgactatatttcgggcggcttggtgaattttgaatacacggcgggtaacacgtttcttgcgggcttcggcttcggcggttttcaggcaaaatcgtcaggcaagggcaactgcggcaaggcggaaacccaaagccttgcggtcaacgcctacaccgactggcggttcttcggcaactttgactggtacttcggtgcaacctatgctttcggcatgaacaaagccgaaaggatgaacatcctgaacaaaagcaaagccgattggaattcaaacctcatcggtgtcttcacgggcgttcgatacgcgtggaagccttttgccgacaccggattttacctgaaacccacaatcggcgtaaacgcggacttcctgatgaacccgtcgttcacggaaaaaagcggggaagaacgcatgagcgcggaatcagaaaactatacaagcgtgaagtcgcttgtgggaattgagggcacttacgcgttttcaaacggcttctactttacgggcagaatgttctacacgcacgaattttgcgacgaccgctacggagtaaatgccatgctcggctcttccttcataagggtaaggggctggaaaatggacagggacgctggcgtattcggcgcaggcatcggatacagcatcacggaacagtggagcgtctatgccgactatgccgcggacgtttcggacaaagtgcgccacaacgtcaatatgggcgtcacgtttaaattttaagtcgattcgcgaatgagcaaaaaatctgcaatatatttctgccgcaatagaatcgcctcataaacatctgtaaaagcattgatagggagggagccgctgttactgagctccggtgtcatggaacacaaacggctttctgtaaaagcgccccagcctctcagcccttccattctggcctgtacacgagcaccgggccggtacgcgaagactgaacgccgcgcaccttccgaacggcggagcccaccagggcggcagcctgttccacctcctcctgcgtcgtcatgaaagacagggaaaaacgcagggaggaacgtaccgcctcatcagacaatcccatggccgtcagcacgtgggaaggcatcggctgcagcgtgtggcaggcagacccagccgaacacagcaggccggcaggttccagcaacagcatcagcgcttccgccgtacatccgtcaaacgccagattggaagtattgggaatacgttccgttccgccggaatgcaccgtcacgccgcccacctgtgcccgcaggagagactcaaaagaatcccgcatccgggacagccgtccggcgtcctcctccaagtgcctcaatgccgcccgcgccgccgcaccaaaaccaatgattcccggaacattctccgtgccggacctcaaaccgtactcctgcccccccccgaacagcaaaggggaaaaaggagcccccgctctcctgtacagacatccaatccctttggggccatgggatttgtgtgcggatacggaagcataatccacttccattccatgcaaatccacgggaatttttccggcgcactgcactatatccaaatgcacgggaactccatgtttcccggcggaggaacacaaaaccgccgcatcctgcaatgcgcctgtctcattattggcccaggcaaaagaaacgccggacacgccccctgcgcacatggactcccatttttccggaaccgctcgcccttccctgtccacggggcagacacagccgctgcccagggccagggccgtcttcaaggaggcgtcatggtccgtggacaaaacgcctatccctccctcccgctccccggccatctggcggaaagccatattagacgcctccgttccgccggaagtaaatacaatttccgaaggaaatgcgcccaacagggcggcaacggccgcacgggcttcctccaccgcctcgcgcacgctcctggcgcagccgtaaccggcggacgggttgaaaaaccgttcttttaaaaacggctccatggcctcgtaaacctccggggccagcggtgtggtagcgttattatcccaataaatcacgccttcataactcccccaatcgcgggaaggagtcaagccggaacataatgcgcagctgcacaagatcactcttcacttttacccgtgattccgcataatgcctctcatgcgttttcttatcacggcaggccccaccagagaagctattgaccccgtcagatacctcaccaaccactcctccggaaaaatggggtattgcctggcggaagcggctgttcacgaaggccacagcgtccttctcatctccggccccacttccctggacatcccgcacggcgtggacttcctgccggttgaatgtgcacgggaaatgtatgatgctgtcaaaaaccaggctccctacgccgacgccgccatcctcagcgccgccgtagcggattatcgccccgtttccgttccggaccgcaaaatcaagaaaacgggggagcgcatgattttggaactggaacgtactgcggatattcttggctccatgcgcgcggaattcggcttcagaggcattctggtaggcttcgcggcggaaacccatgacgtggaaaattacgcgcgcggcaaactggaacgcaagcggtgcgacatgattgtggccaacgacgtttcccgcagtgacattggttttaactcctctgaaaatgaagtgctgctcgtttacccggaccggacggagcttttggaaaaagcgcctaaaacgcaaattgcctttcaaatcattgagcgcgcatgccgtctcgcacagggaaaagctccgtcatggcgcacggcagacccgttccacgcttgaaccggaagaaggtttgccccacgatccgatgtcggcatgtaaatgccggcggcctttcccaaaactacattttccattttcatgcccgtcactcttcaggatttaggctggaacgaccactttcaacgcgctttcaacgccgtcgccaaacccggctgggttccgggacgcctcatccgggaaacgaaaatcaacttcaccgccctgctggacggcggggaagacgtggacgcggtcgtcagcggcaagctctggcatgacgccgccacggatgcggaactgcccgccgtaggagactgggtggcgattgacccgggggaagcgggagacgaagccgtcatacgcgccattctcccccgccagacctgtttttcccgcaaagctccgggaaaaagcagcgcggaacaggttctgggaaccaatgtggacaccgtagccgtggtgacggagccgggaacggacttcaaccccaggcgcatggagcgctactttacgctcatccgccgcagcggcgccgcacctctcatcctgctcaataaaacggaccttttctccagggaggaagtggacgaagccgtgcaggccctgcgggaactctccccggaatgctccatcatcggcatcagcgccctgcacaacaagggaatcaaggaattccgcaaatgcctttccaggggaaaaaccatctgcatcgtcggttcctccggagtgggaaaatccacgctggtcaataccctgctgggggacgaatggctctggacgggggaagtgaatgaggtgaccggcaagggacgccatacgaccgtggcgcgcgaactggtgctcctcaaacacggcggcctgctgattgacaatcccggaatccgtgaaatccagatgtggacggatgaacataccctgcgggaaagctttgcggatttgacggagctggcccaggaatgcaaatttgcggattgcagccacggcacggattccggctgcgccatcaggaaagccgtggaggaaggaacgttggacagggagcggtacttgaatttcctgaatctggaagatgaaatcgcgcggcttgccaaacgccagaaaaaaaggcagatgaacgtggaacgggccgggaagagagaccggaaggtacaggcccggaattatgaggaccgcgtggaactggaacgccgccacaagcccaaccaccgcagccatgactgattctccgtcaaattggcttgtcaaaccgcagaggcgcgcttaccagtaagggatgctcttcccatgcagccttttccgcgcttccgcggcccttctggcattgggcgcgcttcctctctccgcagcggaacagccggaccccgcccaagccaggcccgtcgtttccatcacggacctgaaccccgtccggctgacgagagacgcccacagcaaacttcttgtggcgcaatgcaccattaacggcgttccatgcaatctcattgtggacacggcggcctcccacaccacgtttgacatcaaattcatcaagaagaatttccccggcctgccgcttgaaaacgcgcagatcgcccccggctccaacgtcaacaccgttccccagcttttcgccatgaagtccttctccatcggagggcttcacattaaaaacttcttcggcctcgccatggacctcaccccccttcaaaaagatatgcaggtcagggtggacggcattctgggaatcaactacctgggcttctccccgttcctgctgtccgtcagggatgcttccctccaatttctggaacgctcccgctttccctcccagaacatgaagccgctggaagtggaacgccacccatccggatttttctatgtccgctgctcccggggaggagacgccttcctgctggcccttgattccggttcttccctttccctggccccgctggaacagtggcccgcggacccaaatggaaaccagctcacggccaaggcctccgacatcaacggacacagcggggaccgcaacgtcatgaagctgggcataccctccaccctccgcatggggccggacttccagatggacggcctttccttcgccgtgacgggaacaggcggcagatgccagataggcgtggacaccctccagcactttgacatcatcattgacgcgccgcagggggaagtcttcgccctgccgctccattccaagccggaggcccgcggacaaaaggctcccgccgttaaacgggaatcttgagcatgatgcagatcatgcggatggtgcgggccgtagcgccgaaatgggctttcaacgccacctgcgcgcgggaggactgggcatgggccagcagcggattgtccagcatctccttgagcacgtccgccagacgctcctcatcgcaccgggtaatgccgtccacgccctcaagcagctggaccagcgcatcgaaattctccatgtgcggccccgtcagcacgggcacgccgcaggcaacggcctccgccggattctggccgccgtccgccagaaagctcttgccgatcacggccacatccgccagcgcggtccaatccctcaattctccggtcgtatccgcaatgtagcagacattgtccttcagggtttccggaagctcgccatccgtccgcagcacgcactgccagccgcgggcctccaactcacgcaccaccgtatggcggcgttccgcatgccggggaactatcaaggggaagcctcccgccttgcgcacggcctccgcaatcagcacttcctccccgtcatgcgtgctggcggccagcaccacgggcttgccgcgcttcagcttgtccagaatggcggcaaactccgcattggtttccttgcgctccgccatctgctggtcaaacttgatgctgcccgtcacatggatgatggaggggcgcacccccacggattcaaacctccggacgtctcccttgtcctgcacgcccatggcgtccagcgtggaaaaataatatcgtgacacccatttaaaagcgcggtagcggctctcggacctggcggacattcgggcattgatcatcgccatgggaatgccccgcaccttggcggcgcgggcaaagttcggccataattccgcctctaccaacacaatggcttccggttcaaaacggtcaaagcacctccccggcaggcccagcaggtcaaagggggcataaattacgcgcacgccggacacctgggcattcaccgccgtatcatgccccgtagccgtgctggtggccagcaccgcggaaccgccgcgctcccggagccacgcccggagaaatttgagggccagcaccacttcacccacactcacggcatgcacgtacagcacccccttcggctcccggttgtaggaaacccggtacaggccgaagcgctccatcaaccccgtgccgaagccgccgcgcctcttctgcttgagcaggtaggaaggcagcgtcaccagccacccgagggtgtacaggacattgtaacagaaagagaacaggaaggctttcatcttacttctcaggcaatcgatagaacaacagcatatttttcccgtaccggcgggtatccaccaggtccaggccgtcaaactccgcggcgccttccatgccggttccccagccttcctgcacttccgcaataaacacgccgccgtccttcaacagtccggcaattccggcctccgccagctccacaataaaatcccggtccgccgggcccttgcagtaggggggatctgcaaaaacaatgtcgtacttcctgccggccagcagctcccttttcacaaactgcacggcgtctccctggatgacggcgccgccctccaggccggttttggcaagattggccttggccgtcgcgcaggaaagccgggaaaaatccaccatgcgggagctccctgccccgcggctgagggcttccaggccgaaggctccggagccggtgaacaaatccagcacgtcggcatggtcaatcagcgggttcaggatggaaaaaagggcctccctgacccggtcggtcgtgggccgcacttcccctttgggaacagacagtgctatgccgccggcctttccgctgatgatacgcatgtttttaccggaatgaaaggaacgtcttgttgtccctactggcgcgccttggccttggccttttccagcagggggtctcccgtaatgcgggtgatggggatgcgcagcacgatggactggttggcaatggcaatattatccggattcttctcggacatgttgtaaacgaaataggtatatttgccgtccttggtcttgcccgcgataatggtctccgtcagggtggaaagaatggtcttcttttccatggtccattccttgccgctccatgcgccgtacacgttcagatcgtcataggaaacgtcccctttcagggccagggcgccgttgggggaaatccaggatttggtattggagtcatacttcagggtgctcatcggcagcggtccctgctgggccaccgcggccagagtccagatgccgcgttccccggaggcgaaaatgcccacagctacgggggccacttcctgcacctgcttcagcttccagcattccagatacttggcatactcatccttggtccagcccagacgttcgtcatacggaacgggctgaccgggaacgatctggctgacgagctccttcttgtccttgtcgggcagggaggcaaaaacgccgtcaatcttttccatgaatggctgaaggctttcatcaagcacaacgctgacggcggaagcttccgccattttgccgaccgggagatattcatcgattatttccggcttttctgctgcggacagggaagaaaccagaacggggaccatcagtgttaaagccagattgcggagcgctttcataacgtgttcgtacattttactcaacaaaacacccttggcaagagtcaaagtgagtgttatccgtatgtacatcatgaactggaagttacttttcactaccctggccgccgctctgagccttgcttcctgcgtgtccaccccggcatcccgcatccagaaaaacccagcccttttcaattcccttccgcccagccagaaaacgctggtggaagccggacagattgcggaaggcatgtcgccgcccgccgtcttcctggcctggggagacccctccgccgtcgcggaaggcaaccttaacggaaaatccgccacccgctggatttactcttccctccagccggtttacaccccgccgccctccttctgggccgggccctactggggaggcccctattggggaccggggttctaccgtccctattacccgtattacaatgacgtcacctacgtcccggtggataccggctacgtgctgttcatcaacggcaaggtgaaatcctgggaacgcaggcgctgattaaagaaccggcaggcccgcacgggatggaatgcggcggcgcagcagacggagggaagcttccgcatgatgcgccgtttttctttttgccattcttccgcggccttttttctttcccttccgttcccggactcttcgttcaatccctgtccccggacagggggcgttccagttcctcccggaattcagggaagaacgccttcaattccccggacaccttagggtattccagtttcatttccgccagtgcctccacaatggcgcacatgcagacaagcctggaataccacttgttgtccgccggcaccacataccacggcgcgtcccgggaagaagtatgacgtatcatttcctcatacgccttctggtactggtcccagaactcgcgttcgtggatgtccccctctgaaaacttccagttcttgtgcggggtgtccagccgcgccagaaggcgctttctctgttcctcactggaaaggttaaggaatatcttcacgatgcgcgtcttgttggcgagcagatggcgttccagattattgatggatctgtacctctccttccagaaggctcccttggcatggacgggatcaaacccctcccccgccagaaattccggatgcacgcgcacgctcagcacttcttcatagtaggaacggttgaaaatgccgatcattccccgccggggaagacgggccacgcaccgccacaggaaatcatggctccgttccagcgtggagggcggcttgaagctgctgaccacgcacccctgcggattgactccgcccatcacatgcttcacaatgccgtccttgcccgcgctatccatcgcctgcagcaccaccagcagcgcataggattcgctggcataaagcacctcctgaagctgttccagcagctcaatgcccttctccagcttgtccacggcttccttcttgctgtccttgtccagcttgcccagatcgcccggatcatagtgggataacttgaaccccttgccgtccgtcacccggtacggctcaatgaactttttgcagcgtttgaccagacgggaaggaatatctatcattccggtaatgacaccgttctgcgtcaagacgttgaaataaccgtaaaaaactccgccttcctcccggacggccgtccggcccctgcagcatgaaaaatccgcaaaaggcggaatggcgcagggaaacgtcaattctctatgcgcacctggtccgcgggagtattttccagcttgcagtcctcaatggaccatgtgcggggaggctgaaccttgttatttttaatcaggatgttggcgcacctcttgaactggaagggcttctgcccccagcccctgaaatcattgttgtaaatgattttgttgttgacgaatttaaggttatccgtggaaatggcaaacagcagcggcacgtcgaacgtcttgaacacattgttttctatcaggacattgcggtgataataatccttctgcttgttcaactgcttgacttccgggtaaatggaaatgatggcgttcgtgaactggtagcgggaggtcaggttgttgatgaaggtattcctgcggatcaccacttcatggcaggcgccgctttcataccagccctgggcgtccccggccagcagaatggccgcgccggaggaatggtcaaacaaattgccctccaccagaaccttctcaggcgtcgtgaaaagagaaccgcgggcgcggttgttgcggacgatgttgttgcggaatactacggaagggtaaaaatccgcattttccacggcgtccccggccttgacggacggaggcagcggttcttccagcgtgatcaccagttccgtagaactcttcttcacggcggtttttacggtagcggtgcttcccggttcaagcgtaggcccgttgataaaacggattttttcaccgggcaggaacacttcaaaccccaccgcctggcggtgcatgtacttgcatttcagcgtatggctgtccactacctccgtcacgcccaggcaggtggaatgaacgttgatggcgtcatccatcattccctcgaacaaggctttctccaccacgatctcgccccgggtgttggaaaaatgggtggcgtccgccccggcggtgtgcacgcgccccgtccctttcctgaccatgacgccgccgcccttcatgtggaaatcctccgaccgctggaccagcaaagccatgcccgtgctctggtgcagggccacatcattcaggaccgtcttccgcgcccggtaaaccacgcatcccggatgggggcggttataattccgcagcaccagcgtatcccccggcttgattcccttctgcttgaggttccagtccagccggaggcggttccctccgaggggttccacccggccgttccagcccatgtccgacgtattggcaatgatgtgcccggtccccttctcaaaggccatgcagctccccattccttcctcccagccttcgcccaggaaaacgaacctgttgttcctgatttcataggggtaggcttttttgtctatttccacctccgtggacctgtcgtccgcattcaagacgcgcgcttccgtacaataggaccgttcataatccacggacagacggttgatgctgacgttttcgctgtccatgaccagcaggggaaccaccttgccgtgaaacaggaacagggagccattgccctctacgcggacattccgcaaatcggtcagggtcacgcacaccggatgaaccaggggctggtcatggttggagatattgaagctcatgttcaaggctccctccggataaaaatgatagactcccctagggatgttcagcacgcctcctccctgcttccgcagggcggaaatcgcggaccgcagggccggaccctgatctttcctgacgccgggaatcatgccgaatttggcggcattcaccacggctcccttcatgccctgcggctcaccgcccgttttccagaccaggtccacccagtctgcgtggtcataggaattattttccacccggtcagccatcaggtaaagatgccgtatgccgttttccgctaccggaacggaaaactttttcgcaggcattcccctcttcatcacgccggaactccataaaacttcggaaccgctcattacacggaattccacgctgccgtctccgtccgtaccgtcgtcaatgccgcaggccccttccagcttccacactcttgagccgctgccctccggcacagggagcggaatcatggatgtagcgtgagtgccgatgcccgcagcgtattttttacccccgatgctcaattcaccattcttgaaagaccggtccaaccgcgtttcccccacctcctggcgggccatcagcagactggcggcaggcaccttcacggctgcggacccggattgagccgcgccttcctgcccccgggatagtgccgggaatgatcccgcaacgcacgctgcggccacaaaactccatgaaaacatccggttaaacatatcctttattataccttttccccggttttcttctatcagaaaaattccaattcctgcaaaagccgcccatggagagaaaagagagattgccttcctcctcaaattcggggacactctttccatgcgaccagctttcctcctcctgcccggcatgctgctgacgctttgcgcctgcgggcgcggcggcgccacgcttgaaacggataacgtccaggcggaatggttccccaacgggagccgcacggccattgtcctggatggtgaaacggaacctgccccagcacgggaaatccagcgcgcaaactccggcatgactctcttatacaactccctgggtgacggcagaggcaccctgggaatcaacggggctcttccggaaacggcaacggtgacgtaccggcagggaacatcacccgccgtcctgcactttaagacctcatcccgggaaatactcctcagcggggtgtgccgcctggacgcggaaggcaaaacgtcctccctgaccggctggagctgccaggaacgggggacagccctaccccgcaccggcacggccggaaccatgaccacggaaaattctggacaatgaacctcatgcggatgctgaaaccgggaaaatggaaaatcctgagcgccctgctggccggagcgctggccctggcgtgcgtccagtgttccgtccgttccctggtgtacctgccgccccagcccaaggacaaaaccgtgtatctggaaaaacgcgccgcctgggagccccaccggcgcactttccaccataacggggcccagctcagcggctggcttattgaaaagaagggacagcccctgctggtgtattatggagggaatgccatggacatctccatgatgcttccctacctggaccggttcccccatgccaagctcctggtcaactaccggggatacggtctcagcaccggcacgcccacggagcagaacatcatgggggattccttggcgattctcgactccgtgctgaaggaaaccggaagaacgccggacgacgtcatcctggtcgggcaaagcctcggctccggagtcgccacgcagatagcctccgtcaggaacgtgaaaaagctggtcctgctggttccctttgacagtcttctggaaaccgcccgcggcctcttcccctaccttcccgtcaagcttctcctgccggaccacttccggtcagacctggcagcgcccaaagtaggctgccccgtcagcatcctggcggcaggatcggacgaagtcatcccgcctgaccacgccaagcggctccgggactgcttctccacgccggtcaactaccaggaattccccggcgccatgcataacaccatctggctcagccccggctttgacaaggcgttctccaggagcatcagctactgagccgcttcattccacaggggccagagacacccggcgcaggcattccccctcgtgctccagcagcagccaggaagttccctccggcagcgcgtccggaaacaggttggcccattccacaatgagcaccgcgtccccgtccagatactcgtcccagcctatgccgagcaattcggactcatccttcagccggtaaaaatcaaaatggcacgcccgtaggcgcccgtccgcatgctcgtgcaccagggaaaacgtcgggctggccgccgcatcggaactccccagcccttccataatcccttgagtcaggtgcgtctttccggcgcccagctcccccaccacgcccaacacttcaccgggcattaaaattttacctatttgccgtcccagctccctcatttcctccggagaatgagttaaaacggggccgtttttaaaaattttataccattcgctcattttttcatgaaattttgcttgtctaaaagaaggtgatatggtttattgcggctcccgcatccgcgggtgaaccttaacagtgatagcaatggcatacgcaattttcaaaacaggtggcaagcagtaccgcgttcaggcgggcgacgtgatcgacgttgagtgcatcaatacccttgaagagggtgctgaagcaagcttcgatcaggtgcttatggtggaaaatgacggaaacgtgaccctcggcaccccgacggtggcaggagctacggtctccgccaaggtcgtcagccagttccgcgacaagaagatcatcgccttcaaattcaagcgccgcaagggcttccacaagaaaaaaggttcccgccgcgccatgacgaagctggaaatcaccggtatcaacgcctaatttcaacccttaattttatcctaatcttatggctcacaagaaaggtcaaggttctgtcaagaacggtcgcgactcccgcagcaagcgcctcggcgttaaaaaattcggcgggcaggaagtgatcgcgggcaacatcatcatccgccagcgcggcaccaagtggcaccccggcaagggcgtgggcatgggccgtgactacaccattttctccctcgtggacggccgcgtgttctttgaccgcgaaggccgccgcgtcaatgtggccccggaaagctccgaggctgccaactaaattacagataactctatctccctgcaggggcggccatccacagggatgaccgccccttttttacccctccccgcgcccgaataaataacaggaattgttcttgcaaaacaattgaccctcccccactatccacgcagagcatgaaaaataagatatgaatcccaaaacagattccaaacaagccgcccgcaccgcctctaccctcccggttatttccggtttgagactcaccaagcagcgacaggaagtctaccaggttctcctggaacagagagaccatcccaccgcgaatgaagtttaccagcgggtgcgcaaaaagctccccagcatctccctggccaccgtttacaactgcctggaagccctggtgaatcacggcctggtcaatcaggtcaactttgaacgcagctcttcccgcttctgtcccaatctcgttgatcatgggcacttccaggacacccggaccggctgcatttacgacatcaccatcaaggagggcgtggatctgaaggaattcatcaacctgcccgacgacgtgtgcatcgaagaagcccagatcaccctcaggggctccatcatcacgccgcagggctaaatccctttcatcatcatgagtctggtcattaaaaatttgcacgccaaagtgcaaggcacggaaatacttaaaggcatcaatcttgaaattcccaagggagaagtgcacgcgatcatgggacccaacggttccggaaaaagcaccctctccaaagtcctctgcggccacccggactatgaggtgacggaaggggaggtctggctggacggacagaacctgctggacatgagcattgacgagcgcagccgcgcgggcctcttcctggcgttccagtatcccatggaagttcccggcgtgtccaacgccaacttcctgcgcgccgccatgcaggcccgcatgccccagggggaggaactggatgcggttaccttctacaagacgctgtatgcaaaaatggaccagctcggcatgtcccgcaaattcacctcccgcgccgtcaacgaaggcttttccggcggtgaaaagaagcgcaatgaagtgctgcagatgcttcttctggatcccctttacgccattctggacgaaacggactctggcctggacatagacgccctccgcatcgtttcggaaggagtcaactccatgcgctctcccttccgcagcttcctcgtcatcacccactacaagcgcctgctggattacatcaagccggacgtggtccacgtgctggccgacggacggattgtccgtaccggcggcggagagctggtggacgaactggaaagcaggggatatgaattcctgaaagaggcggaaggagcggaaaaggcgtaacgccgccaatccggcagtcaatcatgagcgacacacctgacatgtcagaggacgggaacaaacagaacctgtttgacttcgaccggagcaaggggaacttctccttcccggaacgccataaattcaacgccggctacggcctgacggaggccaccatcgactacatctgcgacgtcaaggacgatccggaatgggtgcgccagttccgcaaaaatgcgcttgccgtctttgaaagcaagcccatgcccacccactgggcgtccccggacattgaaaaaatagacttctcccagatccgctactatctttccgacggcgaacggcccaagcgaagctgggacgacgtgccggaagacgtaaagcgcacctttgaacgcctgggcgtccctgaacaggaacgccagttcctggcgggcgtggaagcccagtatgactccgagtccgcctactccaacatgaaggaggaactccgcagccagggcgtcatcttcgtcaactccacggaaggcctgaaataccatgaagacgtcttccgcccctggttcggcaaagtcatccccacgggagacaacaaattctccgccctgaacagcgcagtattttccggcggttccttcatttacgtacccaagggcgtgaaactcaagcacccgctccaggcgtacttccgcatcaattcggaaaacttcgggcagtttgaacgcaccctcatcattgcggatgaaggggcggagctcatgtacatggaagggtgcacggccccccagtttgaaaccaccaccctccactccgccgtcgtggagctggtggccctcaaaggagcgaaaatccagtacgtcactgtgcagaactggtcctccaacgtcttcaacatggtcaccaagcgcggactggccatggaagacgcggaaatccgctggatagactgcaacataggctccggactcaccatgaaatacccggctgtggtgctcaagggcaggcgtgcacgcggggaagtcatctccatcgccctggcgaatacgggccagcaccaggacacgggtgccaaaatgatccacgcggcggacgacaccacgtccaacatcgtttccaaatccatcagcatcggtgaagggcgcgccagctaccggggccaggtggtcatgggcaaaggcctcaagggctgcaagaacaacacggaatgcgacgccctcctgctggcggccaacagccgcacggacacctaccccgccatcacggtgaagggggacaggaacacggtgcagcatgaagcttccgtctcccaggtctctgaagaaatgctcttttacatgcagcagcggggcatcccgaaggcggcggccatgtccctggccgtcaacggattcattaacgacctcgttcaggaattccccatggaatattccgtggaactgcgcaggctcattgacctggaaatggaagacagcatcggataaggagggaaatgatgaaccacttgctcaacgaagaacaattccccgcaggcttccttcccgcatggtttgaagccaggcaccgccaggccctggaacaggcgggccagcttccggaaccctcccgccgcatggaatcctggcgtttcggaactcccggcaacgaatccctggaaaactttgaagccgcccctcccgtggcaccggaagccctggcctccatcatcagggagcatgcctccatgccggacgccatccgcatcgtttacgccaacggcctccccgtctccatcccggaagaactgccggaaggcctcgccgtgatggatctggaagactttgtgctccaatacccggacgcggcccggaaacacctggaaacagcgccggaaacgctcggttccgaaaaactggccgccctgaacacggctctccagcacaacggtctggtcatcatggcggaccgggaaatctcctgccccctggaaatcttccacttcatctccggggacaacgtggccgtcttccccgccacgctggtcattgcggagaccggaagccgcctgcacatcctggaacgccacgtcagcgcggaccacggcagccaattctgcggagcgctccagcagcaccatctttcctccgcttcctccgtcaaatacgctttggtccaggagctcaacagccgttcccgggccgtggagctctgccacattatggcggacgattccgcggaaatggagcacctcgtcagccatcccggcgcggcatgggccagacaggagacggtctgcctcctgaacggagacagcgccaacgtacgcctgctttccgccagccacctgaaggaaaacaaggagctggaccagagaacctaccaaaagcacctctatcgcggagcctccagcaacctgctttacgtcaatgtgctggatgacgaggccagcagcattttcagcggcatgatcctggtggcggaaggtgctcacgataccagcgcctaccagagcaaccgcaacctcatcctcagcccccgggcggaagcaaactccattcccggcctggaaatcctggcggacagggtgcagtgctcgcacggttccgccacctcttccatctctccggaagaaatcttctacctgctttcacgcggcattccggagcacacggcgcgcaggatgatcgcccagggctttctgaaacatgcgctggaccaattcagtgatgaaaccctccgcgccgctgtagaggaaatcgtcctctcctgaaccgttcttcatccgggggaaaccgtgtccctttcctcctcctttcgcttccttgataaaagcctccggaatgaagcacggttttaattgccgggaggcattctcccggagaaacggtcccgcgattgacagggaccatcttcattcataatggaaaaaccagcggattgcgaatccggccaaaagaacggcggttgatgcaaacctgaaatcttttgcaaggcagaattttatcaggaatccacaccttcaaattaaagaaaaatttcttttccgataaccggtcttttctattaactaattcggtttcagaaaaacatgttgacttcgaattcgcaatccgtaatctctggtaagatactcaattttcaaaaggtcatcacatgatttccatcgccatcattatccccgcctacaatgaagaattgaccattcgggaagtgatgcaggattttcattcccactgcccggaagcggccatttatgtagttgataataattcttccgataaaactgcggaaatagccaggaaaacttatgaagaattaggctgttccggcacgctgcttcaagaaaaacggaagggtaaggccatggccattaaaaaggcgttccgggaaatagatgcggacgtttacgtaatggtggatgcagacctgacctatcccgccgccgacctcccccgcctgctggaaccggttctccagggagatgcggacatggtatgcggagaccgccatgacgccggcatttacagccgggaaaacaagcgccccatgcacaatacgggaaacaaggccgtccgcatgctcatcaacaaactgttccagggcaacctgcatgacatcctgacgggctaccgcgtcttttccaagcggttcgtcaaaaacttccccattctctccacgggctttgaactggaaacggaaatcagcatccacgccctggacaacggctattccgtcgtggaaatccccactaattacatggaccgcccggaaggctccgtatccaagctctctaccgtatctgacggggtgaaggtcatcaaaaccatcttcgccgtcctgatgaaccaccgccccctgttcttcttctccatcatcagcgcggttctgctcatcctcgccattctggccggcatccctgccgttctggactacttccggtacgactatgtcttccaccttccgctggccgtcctgtccatgggccttttcaccgtatcggccctcgcgctgaccatcgccttcatacttcacggcctccggtccgcccagcggtacgaccatgtcctctccctcatgcattgggaggaacgcaatcttaagcatgaaaaacactgactccctctcccggcgctctttctggctctgctgcctcctctgggccgtcctcgttggggcctgctttgccccggccatcttcgggggcaaagtgctggcgcccatggacatcatggactgcctcatctccccgtatgccacgcagcccatggaaaacgtccacaaccactttaccgtggacgccatctcccaatacctgccctacaactactccgtagcgcaaagcttccggcaggacggttacatgggctggaatccgtacacccacaacggaacggccattgcggaaaacacgatgctgtgccccggtgactggcaccacgtcctctacttcttcctgcccttctggacggcctgggacacgggcatcatcctgcaattcttccttgcgggtctgggcatgatcgtcttcctgcggagccgccaggttccggctccctactgcctgctgggggcgataggctacggcttctactcccaattcgtcctgtggatttaccaccggtgggtgctgggaaccatgtgctgggccccgtggatattatgggcgctgatgcgcaacagggaaaaaagaatcatcgaccttccttccatcctcttcatcgccctcgggttccggggcggccaccttcaggcgtgcctgttcatcgtactgctcacggggtgcgtttggctggcggactggtggacgtccccctcacgctggaagtttaaaaccctctggcgcgtctccctgccctacctggtgtccggcatcgccgggggccttctctccatagacgtgctggcccagaccattccacccctgatggaaggttgcaggcccattcccttcctgaccggaatcactcatcttccctccctggtcaccgtcctgttccccacgctcctgggcgttccggaaacgattgacctgttcaaactcatgggccaggacctgtttgacctgaaattcaccggaggcgtcatcttcgtccttgccgtgctgggcctctttaacagaaaagcccccctgacggcaaaattcctgatggtcatcagcctgattctggccttcacccccctcatcacctatttttattcccgttccaccacggtctatgccctgggcgcctcctggctggccgcgtggcagctccatgcctttactcaggaacccgcaagaacggtctggaagaaaatcttcatcgcgctgggcatcctaacgctgggatggcttctgtgctccatcctgattcaaatcttccaccaggacattctctccaccctccagagaaaccttgtttcccgcctctcacccgctgaaacgggcagggaagcctggtacatgctgaggacggaacgcctgctggaacaaacgtgcatctggtatccccgcacgctggccctgcttgcactgctgtggggaggcctgtgggccgcctcccgcatccatgtcttcgcacggcacaagctgctgctggcctccgcggtcattctgtgctccctgggggaacagcttctcgttcaggccacctgggtccactatgcggacaagcccgaatccgcaggcctgtacagggaacccgaatggctgccgcacctgaaacagcaggtgggggacggttccgtcctgtgctacacttcacacagggacaaggactatttccacgacaaccacctttccagcttcggcatcaaacaggcggaaggctatgaaaccgtcaggcccaaacgtctccatgcccttcaggacatcctgacccatccggaagccgccgccaaggcaggcatttcccaccttctcgttaacccgcgccagcagctcccggaaaccaaaggctggaacctggtggaaaacacttcccggtacgtcctctttgccaacccgcattacaggggcagatactttgcaaacggccctgctacggaagaaagcgccgtcgtgcaccccaactggctcacgtacaataaaatggacttcaccgtcccgccgggggcctcctcactggatattctggaaagctattccgaaggctggacggcacgcatcaacggaggggtgcccgttcccgtggaatgctcggaaaactacggcatcatcgttccccttcccgtttccgacacgcccgcgcatgtcctcctccaatacagggaccaccgccagaacacctattactgcatcatcctcgccacccttctcctgatttgtgccgcctgtctctggcggcatgtaaaaaaacggccttcctccccccattaagatagacctctctcccgtcctgctgggtaaaaaatccgccctgaaagacaggaaacccgtggtttgggcgggaggcggctacggcggccaggtggccgtgcgctttgacgcaaagaaagtcatccgcctcaacctgttccctggcaaaaaacccggcaactgggaagtgtacgacatcgtaaaagaccccgcggagaaaaacgacatcgccgcggaaaaccgtgaccttattgacagggccatcgccatcctggacaaggaatacaagcccgcgcccggattccaggccctgcgctacaaggccccggaacagccggccaaataaggaaaaagggaaggattccccacgatacgtaacccccggcattctgcccttgacgtgaaccgcgccgggggtagtctttgacgcatgagtctgacctcttccctcctctccagggtgctccagggcggttcctgcaccagagaagaactgatagccctcagccgggaaccgctggaggagctgtgccaggcggccaacgccatccgggagcacttctgcggaaacgtcttcgacctctgcaccatcatcaacgggcgcagcggcaaatgttcggaaaactgcaagtactgcgcccagtccgcccattactccaccgcggtggaggaataccccctcttaagtgatgaagccctgctggcgggcgccaggtacaatgacgaacggggcatcctgcgctattccatcgtcacctccggcaagaggctgacggatgcggacgtggaccggctctgcgccagctacaggcacatcgccgaacgctgcggcatctccctctgcgcctcccacggcctcatctccaaaaagcactgcgaacaattgaaggccgcgggcgtctcccgttaccacaacaacctggaaacctcccgccgcaacttcccgaatgtctgcaccacgcacacgtacgacgacaagctgcaaaccatcaagtgggctatggaagccgggctggaagtgtgcagcggcggcatcatggggctgggggaaaccctggaggaccggatagatatgtacatggacatcgccgcactgggcatcaagtccgcgcccatcaacttcctgacgcccatccccggtacgccgtacgcgaacatgaccccgcttggggaggaagaccagctccgcatcgtggcgctggtgcgcttcatcatgccggatggcttcgtccgcatcgccgccggaaggaacaccatgaaggaccacggcaggaaaatcttcatgtccggggcgaatgccgccatctccggggacatgctcaccacctccggcgtcaccatccgggaagacctggccatgctggcggagctgggctatgaagtccgcatgaaataagggctgtcccgttttcccgctcctttccccatgaatcactccgactggtcaaaaaaagatctggaatacatctggcatccctgttcccagatgaaagactatgaaacgctgccccccatcgtgatcgaacgcgggcagggaatccacctgtacgacgtggacgggaagcgctatctggacgtggtcagctcctggtggtgcaacctgctcgggcactcccaccctaaaatcaaccaggccatcaagaaccagcttgattccctggagcacgtcatcttcgccaacttctcgcacaagccggccatcaccctgtgcgaggagctgatgaaaaaaatcccgcagggactctgcaagttcaatttttccgacaacggttcggcgtccatcgaatccgccatgaaaatgagtttccagtaccactaccagaccggaaaccgccagaaagtgcgcttcatgtccctgagtgacggctatcacggagaaaccctgggagccctctccgcaggcggcctggacctttactcggaactctacaagcccctgctgctggacatcgtgcgcattcccgctccggactgctaccgctgccccaagggaaaaaaacgaggctgctgccaggcggaatgcattgacgcggcccaggaggcctttgcgcgccatggggacgaatgcgccgccctgctggtggaacccctgctccagggctccgcgggcatgcgaatgtacccccccgcctatctggcgaagctgcgcgccctgtgcgacgcctataacgtgcacctcattgcggatgaaatcgccaccggcttcggccgcacgggcagcatgttcgcctgcgaccaggccggcatctccccggatatcatgtgcgtctccaaggggctcacgggcggctacatgcccatgtccatcaccatcaccacgcagaagatttacgatgccttttatgcggactaccgggaaggaaaggccttcatgcacagccatacctactccggcaaccccctgggctgttccgccgccctggcggtgctgaagattctggacgaggaacaaattatttcccgggcgcaggaaaaggcccccctcttccaccggatgatcgccgatgcgctggggaaccatccgcacgtgggggaaatccgcagcctgggcctggtgaacgccattgaactggtggaggacagggaaaccaagaagagcttcccgtccgaacggcggctgggataccagatttacaaggaagcgcttaaacagggcctgctgcttcggccgctgggagacgtcctgtacttcaacccgcccctcatcatttccccggaggaaatggaggaggccgtagccgtctgctccgcctgcgtccgcaaggtgctggggtaaacatttttcctccgtaacaatatgtgctgttctttttttgaagaaaagctgcaacttttcttcaggggaggggtttgtaaaaataccctgtaacctcataccgtcatgatacacttcaccccgctccgcaaacgtccggcgctttccgcgctgatgcttctcatcctgggctccggtttctgccaggctcaggaaatgcttaccgattccgcaaggaaggaagccaccgagtggcttaaggaagtcaaatccggctacctgaacaccagctccgcccgtatccagaaggctgtgaccgccctcaccgcggccaccagcacggaaaacgccgccatgaaactttatgtagacgccatgaaagaccgctttctgaacccgaccagcatgatgtcccgcatgctgaaccggggcggagggggaggattccggatgatgcgcatgccgggctccggaggaagaggaggcagcaacggcaacagcagcaagccggacagccccagcaccgccttttccaactggcgcaagcagaatacggggaacaacgtggccccaggcttcaaaaaagcccttcaaatccagtgcaaatggatgctgctgtgcctgagaaaggcggatgccgagaagaacgagcgcgaactcaacgtttcctccagcgtcttgtccatgctggatgaagtggccgccaacgccaaggatgtgggcgaacagctccccatggtgggcggagccagtgaagtaatccgctcctacctgaacatcagcgactaccgttcggatactctgccggacaacctgatggacctcaacaccatcttcgaccgcgtgctgctggctccctacaaggaaaaaaaggatgtggaaaacttccggaaactctggaataaacgcatcggactggaagcgaccctgctgcaaaataattccgccagcgacaaaaaaacggcggaagtggaaaaagccagcttcctggtcaaaaggcagtgggaacgggaaaaggcatgctttgagctcggcgaccaggtggccgcccttgaaaaaatgaaaagcctgatttccggcatcaaggatcccgctgaaaaacagcgcgccatccgcgacctggaattcctgcttcttaccccggcggaacaggcaaaactccgtgaagagcgcacaaacaggcgcatgcccggcggcggcccgcgcttttaacaaccgtcgacagctccaatttccctttcatcccccggtgcgcagcgtgcatcgggggattttactttccggcgcggcgcatcaccgggacggaggcagttcctgcttcccgggctggaaccatgtcttgcgcaggcggtaaatgcgcacgccctcaatattctcatccagatgccaggccgtgcgtacgccgtgccgctcccatatatggcggctgagcatccccatgaacttgctgtccatgtcggaaacgtccccctgcggagtcaggcagacaatatatacgttgtccctgcacaggttcagggaggactgcccctcccagcccatctccttcagcttccgctgcacgggcttcaacggaaaatcccagccgcccagcgtcacgacattcttccgggaacagctccatgccttgcggaaaacggactgtcccggagccaggtcgtcaatggtgccgccggacatctggacgcagaacagggaatccggttcacggtccacccgttcgcacagcaggcggccggcatccggggaaaaagactccagattggcctcccacacggcggcgcacgcctgtgacaaagaaacggtgaacgcgcagaacatgggcacgccgcctgtcagggcgccctttccggtccatttgaaacgaatggggcggtatttatccgaccatagcaggcacagcccggcaatcaggaacgtgggatacaccacgcggaaatacaggcggtctatgctggacatgtacagcagaatcagcaccagcagggcgcccacgcagaacaccagagccggggaatccccccgccggaaagacacgcggcaggccaggccgaataaaatccagcacggcagaaggtccatgacggaatcccaggaaaacagatgaagggccttctccccgcggacccaggccctgggccagaactcgcccccgtcccgcgccagcagaagcctttccagataatccgtgttgaaagcgtccatatcgcaattggtgaacatccggaccatcttgatatcgttggcgaacacgccgtactcctcgcactggtaggcgccctccggcctgatggggcatgtgtccgaaaggagggcgcgggcctggttccacgccgccacgtcacagccctccagcacattccggtgggcgtgcttgttatactcattcagaccgaaggagactgccagtacgccggccagggccagccagagacggccgcgggcacgcatcttttcccgggacggtttaaacccgtccaaactgccagccagcaggatggccccccagaaagcatcgcacaccagggcggcgtccagccggatcatgctgcccagcacgcacaggaatccccccgtgcacagtcccttccaggaggaggaaccgtacttcaggcataccagcactccggtgaaccccgtcaggaaggcggcatggctgaattgcagggcggcataaaagcccggcatgattaaaagccacaccagcagcaggaccagcgtattgaaatcatatctgcgcgccttgcgggcgtgcgccgtcagcatcgtgaaaatggccgctccgctggacagcgtggcaagcgccaggaacacgggccagacggacaggccgcccagaacgggagccgctttcagcagcagcccggtcagcaggggattgacgaaaatgacgtgagcgtccgcgtaggaggggtcgccccagccgtcaagcacggacgcaatcaccagatcgtcattggattggtacgccacgcccacaatgctccaggccaaaaccagcaacagcaggttgaaccatacgggatggagcagcggaaaaagcgatacccatctccaaacctgtttcaacataagcaaattccctgactttgcgggctgttctccctgcccgggcccgcatactagaaacggataaaatgaaagtcaagagcctatcccggcgcaaagcccggaaggaccaaaaggccatggccgccgcctcagcggttcaggcagatgataatgcccgcaataatcatcaggttgccgcccaccttgcgcatggtaatgggcttgccgaaaaaaatccggtcgaagaaaaggatgtacacgtatgcggagcattccagcacattcactgtaatcatcggcaaatgggacaggcagtaaaacgtgagcaggcagcagcccaggaaaatggaatacgccgtcacggtggccggattcacgaaataggaaaggccggacagccgttcgttcatggcggactttttcagaatcacctgcgtgcaggaggccaggaaaacggaaaacaggttcaggccgatgtagaattcctcattcatgcgcgtcctcctccgtggaaacaagaataatgccgctgataatcagcaccgcccctgccgccagcgtccaggaaagggtctcccccaggcagagccacgccagcaggattccccagatgaccacggcggaacggttggcataagccacgcccagattgaactttttcagcatcacctgccaccctgccgcataaatgcccagcaggaacagcacgccggccagcagggcgaaccggtgccagtccgtccagctatagggagccgccatccgccccagaacggtattcagggcgtaaacgatgaacagcaggtgcagaataaggtagttgatcatgagagaaaaaagagcggaggaactcactcataccggcgcgccaccactacggcgggcctgtgcttggtctccttgtaaatcttggaaatgtaaatgccgatgacccccaggctcatcagaatcagaccgccgaccagccagatggaggccacggaggaggcccagccgggaggcgccacattgtacaaaagctggcgcacaaccacccagatgacgtacagcatggcaatcagggtgacccccagtccgaagtaggaaatgtacaccagcggcctggcgctgtaggaaaccacggaattcatcgccagcgccatcttcttgcggaaggtgtaggtggtgggggaagaggacgccttcttcaccgtgcacggcacctgccggaagccggcggaaacgcacaggccgaagaaaaagggctcccggtcctggaatttcaacatctcccgcaggaaacgcgcgctcatcagccgcgccgtgaccatgttcctggtaatctgctggtcggaaagcaggttgaacagcgtgtaaaacaactctccggaaacggcttcaaacaggccgccctttctcttctcctgcacgccgtacaccacgtccgccccggtggaggccatctcccgggaaaaatccgccagccattcgggggcttcctccagatcactgtcaatcaggaacacgcgctctccgcgggcttcctcgcaggctacgtacatggccagatggtggccgaaattgcgggacaaatccaccacgcgcacccggctgtccttttcccgttccttcagggcctgttccagccctcccctggggcagccgtcattcaccagcaccacctctgtgcgggaggggtcataacccgcctcaagcgcggcagcaaaactgcgggaacagaactccgccagatagccacccgtgcagtacacggtagccacaatggacagttgaacctgtggatcagtcataacatttttacatacatcagaacgcgctttctttccccgttcttctcgcactccccgtcctcttccggggcatgggaaaatcccatgcgttcatgaaaacggatggaagcggcgttattctccagaatccgggcgtacagccgttccagctccagctctgttgcagccagctccatcatccgcgcatacgcggcggaagccgggcgcagttccctgaatccccggtcatacagataaatgcctatctcaccgcggcgcgcggcgcggtcaaaccacggcaggtacaccagccccagcggcacccggtccgcgtaaatcacgcaggcaagggcgtcctcaccgcggatattcctttccagccatgcctggtgctggtcctccgttacctggtccagcagaaaaaaagggctgaccgcgtcggaattgcgccacatgcggagctgcatgcgcatggactcgtccacatcggacacgttgaccaggtgaatcttcatcattcttcaaactcttccaggccgaacccggcccgcagcacttcccggcagccctcttcccccaggtcataatacaggggaagcctcagcagcgtttcactggtgcggtccgtatgcggcatggggccggcacaacgcccaaacctcaccccggcgggggaggaatgcagggggatgtaatggaacacggccttgattccgcattccgccagtttgccaatcaggctggtgcgctcctccagagaattgagcaggatgtaatacatgtgcgcgttgtgcgcgcagtgttccggaacgcacggacgccgcaggacgccctgtttttccaggggttccagcgcgcggtggtacatattccaccacttcagtctttccccgttgatctcctgcccgtgttcaagctgggcgtacaaataggcggctgtcatctctccgggcaggtaggatgagcctacgtccacccaggtatacttgtctacctggccgcggaaaaacttggcccggttggttcctttttcccggataatctccgcgcgctccatcagctcccgatcattcaccagcagggcgccgccctctccggaaatgacgttcttggtctcatggaagctgtagcaccccaaatggccgatggaaccgagtctgcgccccctgtaacaggagcctacgccctgggcggcgtcttcaatcacgtacaaatggtgccgccgggcaatctccataatcgcatccatctcgcacgccacgcccgcataatgaactacgcagatggcgcgggtgcggtccgtgatggccgcttcaatcagcgtctcgtcaatattctgcgtatccggcctgatgtccacgaacaccggaacgccgccgcgcagcacaaacgcgttcgccgtggagacgaacgtataggaaggcatgataatctcgtcccccgggcggcaatcgatcagcagggccgccatttccaaagccgcggttccggaatggactagcagggcctttccggccccggtgcgctccataagcagctcatggcatttcttcgtataatagccgtccccgcataaatgggcacgctggatggcgtcccggatataatccagttcgggaccgtgtttgtgaggttggttgaaaggaatctccatggctccagaaaggaccggctcatgacgaacgcccggcgcaggcatgccggtccacgcggaaaacgctccacgcggcagcgccgcccgcacgcggaagaccctactatgaacggagggctgaaaacaagcctagaccttgatgaaggtccggtttttgtacatgtaatacagcacgccccaaatcagggcgtaattgcacaaataaaagacaaaccggttcgcatccccgaaacactcgctgaacccggtaaacagcacccgggagaaattgcgcgtgggggggcacagctccgcccacatgtacacgaaaatggcattgctcccgatcacggagaaaaagaacgtcagccagttcagtttcagcacatccgtcagcaggtagaacagggccagcaggaaatagcaccatcccgccgcccacaataccatggagctggtgaacaaatgcttgatgataggaaaatccaggctccagacatatcccagaatcaggcagcccgcacctgcgccaagcagccacgccagcttcttcccgtgcccctgcacccctttcagaatctggccgcccagcagcccgagcatggtcatggccccaaagccgaactgggccagaatccacgcgtaattcgtcttatcctgccaatcccccatcaggtacttgtccagcagcagtgccaggttccgtcccggttccagcatccctgccgtgcaggaacccactacggggtcggaaaaaggaacgaacttcatgaccagccagtacacaaccagcaacagccctgttaccactacctgccaccggatggacagatgaagaaggcaaatggccgcaatcaagtagccggaggcgatggcctggagcgtattgcagtacagggacatcttggacggttcaaaactcagcaggttcccctgcaccaccatccccagcaaaaaaagcaccaccacccgcttggccaccttcaggtaaatcttccacatgggttccgtgccgatgcgcctggaaaaggaaaacggcatggctgtccccacaatgaacaggaaaaggggcatcaccaggtcccaggccgcaaacccctcccagttcacgtgcgcgctgtgcttcaccagccatgcggggctctggtcataaaaaagattgatgccggctaccaccagcgccaagcctccggtcagaaaaaacatgtcaaaaccccgcagggcgtcaatggccgcaatcctctgcggcttggtaccggaagctgaactcatagtgatattccctattacggagcccttcccttcaacctttccgcatgctttctttttccgcgatcctgcaaagaaaaacggtcgttccgtaaaaaagacgcccccctgcggcaactccgtcatgatgaccttctccgtatttccttccccgcgttccgtgctatgctctccccgcagcatgaccatcgggaacctccaatccggcaaccgcgacagcttccgggacattgaaatctacgcccggctgaaaatggatgaactgggcctcccggactggaaattcggctgggaccgcgcccgcaggaggctgggcgtatgccgcctgctggaaaaaagcatctccctctccgtccactttgtccgcgccaatctggaagccccccatgaaatccgtgacaccatcctgcatgaaatagcccacgccctggcctggacacgccacggagaacgcacccacggcccgcggtggaaacaaatctgccgggaaataggggccgtcccctgcgctgccgccaaaccggacgccatccgcgtcaccacatacaagtaccttctgcgcctgaaaacgacgggcgaagtcgtcggcaaataccaccgccgccccgcctttgccaaacatctcaagcgcatggccctgaaagggcgccccgacaccctggggcaactggaattgattcccagcgaaaaacaggatacgtcattatcataaaagctcaccttctgcattcttccagcgggtcatcagggagttgtaccggcattcgtatgtggtcattgtttgaccattccatcctgaccgttgccgatggcagtcacaagattgagttggaatggtagatattactgcgaagtttggcgttgggataggagagccggtaaaagaaaacgccgatcttgtcacatgcggtttaccgcctatatccacagacattatttcttcattacttttactttaaagtatctattgtacttcaggcttttcatccgatatgactggatacacaaattgatgtaaaaactccgaatgcagaataagagcaatatccatgatcatatcctggaatttggtcaaattttcatcattcacaatggatgaactttttttccattccagatcattgggcattcggatataaaatagttcggaatccgatatttcttctttccgttgaaaacgtaattgggaaaacaaggttttcatttttgaaaacagatcatttgaaatgataagacctcttgtgacaccatccaaactaagagccatttcccaatactcttgttgagataatttacgcaacccatattgatgttccagttgctcgtaacctgctggaatcggcaatgtcttatgaaaaaataaatcattgaacaagtgcattttatcatttttgatcatggcgtaataaatatacttcccgcgaattgacaacccagctgtatattggaaatccaaaaataaaatccggatgctgtcgggataatctttcgggaataatatattccataaccgcttcgaatcaaactgatcagccaaataattatgattatctttattttttaattcattatttgctttgaattgatgggcaatccataattgctcatataccccaagatgagcaaactcagacgtattataaatcagtctatataaatactgatattttctgactacgcgactaatatactcgctgcaccacacaagccatgatttgtctttcaaatcagttctgccggtgaaatatgaacataaggcaacccatggcatattttggtattggatcatggaaagggttcctccgtattcctgcatattcaaggaacctatatctacccactccattccaagtcttctcggtgaatgttgaaatagactcatggtatctgaaagctgtttcaaaagacatggcaatagttgtatggcttgcagttcaggagcattgatataatcagtcaaactgtacatccagcagggcattaaatttaggtattcataccagaaatgcgtgaacgggtaataatgccgatacaggagttgctggcgacatatcctccatgtcttaatgccatatgggttactgggcaaatccggtgatatgggaaattccagccatgagagagagcctgattcaggatagattttccgcaattctgattccaacaaattgttcttatctttttccaaatttccccaacatggatcactcaccaagtaaaaaatctgtatatcactatcgttaagactcttgctgctggaatctgtagaagatacaaatatatcatctaagtttgcagaagactctcgcaggtgatcatccccccacgaaaaagaacctaaacataaatatattattaagatattagtgcctagtcttcccagatttcggaggacgtggcttcggtagtaaaggttttccgtgttcatctaaaataacaatatttgcttctttatttgattgagggtcatcgatctgtcgcgctaccaagatagctgtgaaatcttcttctgagaattgtgtttttatatcttgatccaacgtttttagtctgagagctttgcgagctggtttcggagtactttggataacatatgcagggacactttcaggattgtccattttaggaactctatgtccattagcccatacaaatccatatccagtacgttcatcttctggagaaagggaaccaggtccaaatacgccttccaaccttccgcctagaacgaaccctgttttttcatttataccatcgtgtttgaatacgatattgtgagaatgccaaattgctacttcacaataattttttggagctacttctggttggtggtgatatgttttactctctgcttcgtgattacttactttatatgaataggaattagctgttttttttctaaataaagcccctccatgctcgacagtttgcctgccacttaacatcttaaaattagcttttttaataattttacttagtgcagctaaaatatgcttagatacttcttttttcaagaattttgttgcattatcataatcatccatcaaagcaggctttaatcctaataagtctaatttatttatcacagcatttcctgaaaatgcatataaatttgctcccccctgttcatcaataggatccctgttaatccatctgccgtctgtaggattcaggtagcggtaattgtagtagatcaggtcaagctcgtcgtccatgaactcgcaggaaaacctgaacttgttttcctgagccctgtcgccctgcgccgtgattagggctccaaggggggcatactcatagcgcgcccttcgcgtctgcttacagtcaaagatggaagtgacgttcttcagagcatcgtgcatgaagcaaaaatgttcctttattcccgtaccattatccttccagctggtcatcatcaagatacgcgaggccatcggttccgtcggatcccacagataggttttcgcaagtctgtaagaagggcgcatcaaatccagttgggccacctgcaaatagccccggtagaggaaccagcaatagctggctgttaatccgttgacggtgaccttcttgctgaagcgtcttccctggtagtcgtagccgcaggtaaggacagtccgtccgtctttgctggtaaaaattacagggcggtcattggcatcatagctcactttccaaatgccgatagaagtcttgattctggtctgattgccgtctgcatcgtaagtgggaatgaatggttccgtatttctggtaatgtccgtgtactggttaagccggtcggcattgtaggatacttcttcctccagttcccgtgcagtcttgcggttgccgatgttgtcgtaccggtagctgtagctgcctctctccctgagttgatctccagtcaattcactgcggctgttgtaggtaaaatctcttactgtggcaggaagggcggcatctcaggagtcccggcgttgaactggacgcgtcagggcatcatactggtattcatggccggcggccatgcctccatttccctgtttctcatagccaatggaagccacgaggttgagcttgggatggtagatgtttctgcgaaccatgccgttggggtaggtgagccgattgaggaagccgctggtttcatcgtattcccaagtgaaggaagaggccaaaccatccagattcaccccaatcatgccacctttccgatcgtagtcaagatgggagcgctgcaccgtgcggggctctggtcataaaaaagattgatgccggccactaccagggccagccccccgtcaggaaaaacatgtcaaaaacccgcagggcgtcaatggccgcaatcctctgcggcttggtaccggaagctgaaatcatagtgatatcccctattacggagccctgcccttcaacctttccgcatgctttctttttccgcgattccgcaaagaaaaacgtctgtttccgtaaaaaaaccataccctccgcggcaactccgtcatgatgaccttctccgtatttcctccccacactccgtgctatgctctccccgcagcatgaccatcgggaacctccaatccggcaaccgcgacagcttccgggacattgaaatttatgcccgcctgaaaatggatgaactggacctcccggattggaaattcggctgggaccgtgcccgcaggcggctgggcgtatgccgcctgctggaaaaaagcatctccctctccgtccactttgtccgcgccaatctggaagcccccatgaaatccgtgacaccatcctgcatgagatagcccacgccctggcctggacacgccacggagaacgcacccacggcccgcggtggaaacaaatctgccgggaaataggggccgttccctgcgccgccgccaaaccggacgccatccgcgtcaccacatacaagtaccttctgcgcctgaaaacgacgggagaggttgtgggaaagtaccaccgccgccccgccttcgccaaacacctcaagcgcatggccctgaaagggcgccccgacacgttgggccagttggagctggcgccttatgaaaaagaatgaccaagggtggcatacaaaatttctgatattgtcgcattaatatcaaaagtttcctctctgcctggtttgactttcgatcggtccaccacagctattgtaacaatcgccaagcctggcttttaaactggtgcggcatttgaagaatatccaaaacaacgacaggaatatttgaaacctacatacttgactaatcatccttaaatagtcatctgattcgtccaaaccgggcatctctcttttcattaaatccaataaataaaaaatggaaagaaactgtgaattattattaaaatttaatgatataaatttctaagtatatcattcaaaaattgttcaccttcaaataataaaaagatgtaaaatagtctcattagtcaagtatatagattcctcaaaaacaccggaacggctatacaacccagcaaagctatctgctataaatcagcaaaagcaaaccctccggaaaatgcaactttccggagggtttggaaatattaaaatcttacgtctaaccctgtaacgctttttcaggacgaaccatacctatcattttgtcaattccatagctttacatcgttgattcccttctgctgaccaagcgtattcaatatggagcaatttaattgacatatcttgaatttcaaaagtgaaaagaacacaatccggatcacgtttcattccattttcttctggcaacggaggcaagtcggtggaattcaacgtaaattgataaatatccttcccttttaattgcaactgaatcggcaatatactcctattcgtaaataataccaatcggtcaccatttcgaatatttttcaattttccctttcccttgatatcttccgtatagatagtgcttttattatgataaaaagaaccaacaggattaataattttttgaaaaaacgaattatctctctcaagagagatgaaagcctttacaggtatctcgtcttgattttttatggttacttccaattgctcttttccaaataaattcattaaagaaaaaggaattaaaattaataaaataattagaatcttatttcttacatttttcattttcgtcgaattcatcatttcctggttgagattctggaggatcataatcaccgccaatacaattcctataagcagttttccatgttgtattgctgttattgcctaaaggcttatagatataacattcttgatttattttttccatttctttttggatacaactataggctattgaacacattctttcactcacgatagctacagtctcacaacgatcaggattgctttcggcatcattaagatcttcagtgatacctacgctgagaggatccgttccatttgaaatcgaaccacatcctccaatgacattcccccatgagccacaacatcccttacaatgagagctttgtccatttccgttaccactaccgctactaccgctactaccaccagcaccgctactttttcctcttcctgtaggacctcctctacatcctctggaggggcctgacgaagagacaaacctgatcacgcaatgggctctgctaaagaccgctacaggcctgcaacaaatttggattgaacatccttcttgcggaggtgttggtgcaggaggtgttggtgcaggaggtgttggtgcaggaggaaaaataggaacttcaacgattccagaagcacctccattgtaggggggtattttacctaataaatccacttctatgttaattctattcctaataaatgcatacaaattccaacctccttgttcctgaatgggatccctgttgatccatcttccgtctgtgggattgaggtggcggtaattgtagtaaacgagtcccagttcgtcatccatgtactcgcaagaaaagcggaacctactttcctgagccatgtttctctctgccacaataagtctgccaaagggtgcatactcatagcgagctcttcgcgtttggtaatcatcaaagatagaagtgacatttttcaatgcatcgtgcatgaagcaaagatgctgatcaatggttgttccaccgtttttccaattagtcaacatcagaacgcgtgtagcggtcggttccgtcggatcccacaaatagctttttaccagcaaaggttcaggatgcatcaaatccagctcggctacctgcaaatagcctcggtacaagtaccagcaatggctggatattgttccattgacggtgactttcttctcgaagcgccttccctggtagtcgtagccgcaagtgatggccgttcggccatcctggctggtgaagacaacggggcggtcgttggcgtcgtaactgatttcccagatacctgtcgaggtcctgatgcgggtctggttgccatctgcatcgtaagtgggagtgaatgaaacttcattcacggtcatgtccatgtactgattgaggctattggccgcatacgagacttcctcttccagttcctgaacagtcttgcggttgccaatgttatcgtaccgatagttgaagctcccaccctgccggatttgatctttgaccagttcactgcgtttgttataggtaaaatctcttatcgtcgcaggagtggcagcatcccatgagtcccggcgttgagtgggacgcatcagcgcgtcgtagtcgtattcgtggccggccgccaattcgccatccgcgcccttcctgtaaccgatggcggttacgaggttgagcctgggatggtaagtattgctgcggaccatgccattggggtaggtgagatggttgaggaagccgctggttggatcgtaccgccaggtaaaggaagactccagtccttccagattcatcctaataatgccaccctgatggtcatagtcaagatgggagtgctgcacggtgcgtgtgccgagcatcaggcgatatccgttggaacgcccctgggcatcgtattcttcctgagtgcagctttccacacctccaaagaaagtgtcctggatcatgcggccgtaggaatcgtaggaaaattccctgatgccggaggcatcggagatagagaccacttgacctagatggttataagaatagagccaggatatggtttcatcgctgtgagaaatggagacaagttctccggtcaatggcgcgtagatatagctagcgacgatccctctggccttggtcaatgtctccagacggttgagtccgtcgtaggttttggagacacaggacccgtctgcataggtcttcttaagttccagccccgtagccacgtggtagagccaagtggtggtgtctccgtcagtacggccggaaggattattcgtaatatccccttcatccatcctgaaagtagtcaacgccaccatgtgatcggcttcgtcgtaggcgaaacaggccggctgaatggcggtgccgtactcggctatctttctgccgcggatgtcgtaggaatagcaggtagtgcctcccagcccgtcggtgatggaagccacggcattgcagcagggaaggtagctggtggtggtcatggtgccggatgcgtccgtgatcttgacagtacgtcctgcaagatccgtttcctcaatagtagtgttgccgcggccgtcggttttttctagaatcatgcctgtggagatatagaagcgctgctgtgaggcatggatgccggtgtgattcgtttgacttaccataaagccgtctacgatgacagattcggctataatatccgaagtcggaatctggttgaaccgggcgcgtttagtcggagcggtatactccgtccactggatgctctgctgcccgtagacgtctgtggtgatggatttgttttccagaattgcactgagcctggaaatcatattctccgtggtttgagtgagggggcaaccgtcggcattgtaggtagtggaagtgtgcacctggtagatgccgtcttcccgaacccggaagcaggatgaggtttccgatatcctgttttttgaagtatcctccggatggagagtgtccaagagaacagttcgtcttatggcttgccccagttcactgtaagtggtgaccgtgggtgccaaatcttccttttgggtgtgtacgagcagtcctttctcattgtaggcattcctggttgttacgaatccccccttcgtattgggttgttcctgccggacggtttggccaaaaccgttttccagattgcgtgagagaatggctcctttggacaaagtggtggtcaggatgccttcttctgtcagctccagccgggtctccatctctcgctggccggttccgccttgtaagatggtagtcccgtcatagtacctcttggtaagtagtgtggctcccgaaggagtagtgatggttgttgtaaggtagtcctctctgtattccgttcgtgtcactctgccaagtatatccgtagaggaaactactcgtcccagatcgtcgtactgcgccccttctaccgtggtcatggctcctatgtcgcggcgtgtcgaaacctttcttcccgccgcatcatagctgtaggaagtaattgtttccggagtggtttccgtcgccgagcgaatggtttcctccagctgcttggccgagttgtagccgtagctggtggtgatgccgtcttcgtcagtttccctcaacgggccacagcacatccattccgtcgtgctggtgcgcccgttgcccttcgtcgtcttgacgagcctctgttcgtcatcgtactcgtagtcctccgaggcaatcagcgaccagtcctctccggtgtgaacgtattgttctttcctggtggtggcgccgttttcagcgatgtattgcacgtttcgtgtactttgtcccggaacgatgcttccgttggcctgcacggtctccgtctccttgtggagggctccgtattccgcggctgcttcataggaataaaccctctggacgccattgacgccctggctcatcttccgcctgccccgggcgtagggatactccgccgcctcgccgtaggtttcagagatactgatatgtgtgttttccgaccccaacgccgtttccttcaccgtggtgcggctgacctgcggactgtcttcatacgtgtaagtgcgcttgagaagttccgtttccgttccatcctcggcaatgaccaccttagtttccgtggctggcctgaagtcgttaaagcgcaagtcggcgtaagtggttcgggtccctctctccccgcctccggcccagggagcagcggaaagcacggttctgccctggtcatcgtactcgtagcgcgtgtaaccgccgtcgggcttgatctccagagacacccggaactggtcgttataggtatagagggtggttcgggccagaggtgtgttgtatccctccgtccggctgatagtcagccagcccccgtcggtgtacttcttcaccgtgcgggtacaggaagaaggcgtttcctcgtcgatgccgcgcaagctctcaatcatttcccatttgcctccggggaggacatttttctccaccgttcgcacggtgcgctcatccccctctccctgaatggtcgtcaccttgttgccttccgtccttcgctgcgtccggaagacaggcatcccttccctctgttcggcgatatccatcacctgcacgccctggtcgtcactcaattcatagctgaccgtcttgtaaggagttccagtgccggcaaagccgcgcgcattcttgctcacctggccgggagcgtaccattccagggtgagcctgttgccttccccaaccgcctggagcagtccctgggacttggaccagatgctttgaatggctcccgtggaaggatggcggttcaccttcatctgccgggaataatcttccgccgtggtttccacgccggaggcggaaaccatggagacgacctttccggtggctgccgagaagcgcagggtgcgcccattgctctggaccatgtccagataggcgggagagccgccggtgcagggagacttgtcggcattcagcttctgaaccttgtagttcaacttgcgcgaacttccggagacggaggcttcggcatggccgtcagaactctggaaggagatggaactgcccgtgggtcgtttgacggagatctgtccggtttcgggattgcaggaggcgctccattcgagagggtgcttgtagcgcagggtgatggaagagagggcggaaggttcggcaagggtgcggggaacggggaaattacttcctcctgcccctcctgagtctccggttcctacttccagtaagccttcgcagtcgtcggctccatccgggttgccgccgaagaaatgggaggtgttcttgctgcaatcggactgttcgatgtcttcgtcgcaatcacaggaacaggggcacgggcaaccgccttcctccggctcgctggaggaagaagagagggaactggaactactgctggaagaggaactagagctggaagaactcgatgaacttgacgaggaccaggaagaactgcttgacgaggaagagctggagctactcaaggaacttgaggacgaagaactcgaactgctggaggacgacgaactggaagaagaactgctggaactgctcgaggaagagctggaagacggagcgctgctggaggaagttggtgtttcaggcaccaaggaactgctgtggaaactggaagacgaccagctgctggaagaagatgacgaggaagaactcgaactgctggaagacgacgaactggaagacgacgaactggaagacgacgaactggaagacgacgaactggaagacgacgaactggaagacgatggagcgctgctggaagaatccggaggctcgggagccgaagaactctgccaggagctggaagacgaactgctcgaggaggaagagctcgaactgctgctgggcttggggtcaaactcaaaggaatctcctccccctgccgaggaactgctagacgagttcccttcctcctcttcctggtacaggttgaccagggttagcacggtttctccttctttgccggcaggcgtgttttccgccagcaggtaatagtccaggtcgggctcgccttccttgtcgcatatcagggcaatgcagaactcggcttccgacccctggtcgggctggtgttgatggacgatgtggcaccagtagtatccctgttcgaactggatctggcgacagagaggagcggaagatccggcctccgtggagagttccagatccttggcgggaatggaaagggagatagaagagtgggcgtggaggtggagaaaacaggtggcgggagccatgaccttgaggtatccgaaccattcgtggcgggaggaggaggaagcagcgcgtttggggataaggacaggagcggagaggccgttgaccaggaagttgccctggggctgtccgttggggtacatgggaatgaaggggtagacggtgtccatggcgccgatgttgaaagtgttgttcatggtaatgaaatgatgttggctcaatagttgcgactaccatgagaacaagaattaccagtgtaaacacgccgggaacgttatggtattcaaatacacgataatattatcaacataggtatttcataaaatacataatacttcttctgattctcttgattaatcaaggcggcaatacagatttttccagcgaccagctttaaagtcccaatcaagcacaagacatctgatcatccatatccaggacgctagataccgccggtcagcgaactttctttcctcctataagatttccctggaagcaccatctaaccgaacgtcagttctacagacgctctgcttcaccaagcctcctcccaccgtcacgatgcagaaacatcattcaccatcgaccggtttggccgtggaactcagcgtgcactggcgcacgtaatcgtacaccttggggtcactgtctcccgcggcccagaccactcgcaggaagtcagcgggatggatgttgccgtgttcccggaagaagcggcggtcgttctcacagcagtagatgatgtcatcccccatggagccggccagcttggcccgcgccttggcaatcaggcgcggaaggtagggaaggccgctgagttcatccccgaagcccggcaggtcatacccgatgacgggcttgccctggtaaaactgcccgtgctggatggtcaggaagaagtccctgcgcgccgcggccatcaatagtaccgtggtgggggaaggttctcccgtgcgggcatagagttccacaaagtcaaacagttcccgcgtgcggcagccgatggaggacaggaagatgatttcctggtccgtaaagaagccgtccacattcctgtgaccttcatggtaacgccccaccgcctcgcggaaaaggtcgtaaaacgtgtcgttccagtcttccgccatcatctgcccggggatttgtgtttgcgcttgaagttgagcatcatgatctgcttggtcaggttcgcctcaaaccgggcctgttcctcgcgggacatttccgagcgggccttcagcacttcctgcgcttcctgaatggcccgttccacgctgccttcatcaatctgggaggagttgagggccaagtccgtcaccatcaggacgtggtcgtcattgacctggacaaagccggttcccactaccatgctttcctccgggccatccaggggcttgtagcggagttcccccggttccaaggaggtgatcagggccgtatggtgttccagcacgcccatctccccgaggctgccgggcagatacacgtattccaccgtggcggcaacggccacttcatccggggtaatgactttgaactccatgctcatggtgtggaattgcgggaaaagggttattcggcgtcctttgcatccttgaggacgtcatctatgccgccgcgcatgaagaaggcgtcttccggaaccatgtccagcttgccttccaggatttccttgaaaccacggacggtttccgagacgggcacgtaagcgccgggaatgctggagaagacttccgccacgtggaaaggctgcgtcaggaagcgctggatcttgcgggcgcggctcacgatgagcttgtcttcttccgaaagctcgtccatgcccagaatggcgatcatgtcctgaaggtctttgtagcgctgcagcaccatctgcacgccgcgcgccacctcatagtgctcattccccacgatttccggggccagggccttggaggtggaggacagcggctccaccgcggggaacaggccctgggcggccagggaacgttccagcaccaccgtggagtccaggtgggcgaaggtagtggccggggccgggtccgtcaggtcgtccgcaggaacgtaaacggcctgcatggaggtgatggaaccgtgcttggtggaggtgatgcgttcctgaaggtccgccatttcctccgccaggttcggctggtagcccacggcggacggcgtgcggcccagcagggcggacacttccgaccccgcctgggagaaacggaaaatgttgtcaatgaagagaagaacgtccttgtgctcctcatcgcggaagtattccgccatggtcagggcggacaaagccacgcgcagacgggcgccgggaggctcgttcatctggccgtataccagcgccaccttggattcctccggcttttccaggttaatcacgccggattctatcatttcattgtacaggtcgttcccttcacgggtgcgttcccccaccccggcaaagacggagaggccgctgcgcgccttggcaatgttgttgatgagttccatgatgagcacggtcttgcccacccccgcgccgccgaaggcgccgattttgccgcctttcaggaaggggcagatgaggtcgatcaccttgatgcccgtctcaagcacttccgtgctggtggattgttcctccagcggaggggcgctgcggtgaatgctcttttttccggcgcagtcaagggcgccgcgttcgtccacggcgtcacccagcacattgaagatgcggcccagcacgcactgccccaccggcacttcaatggggtgccccgtatcccgcacgggcatgccgcggcgcaggccatccgtggagctcatggccacggcgcgcacccagccgtcaccgatgtgctgctggacttccagcaccagggtcttgcgctttccgttaacttcatagtccacttccagcgcattgagcagggccggaagcgtttcagcctgggaaaaatccgcatcgaccacggcgccgatgatctgaacgagagtgcctgtgttattcatcatgagaaaaacttggtgttgaaataagaggagtgagggttctgtttgaaaggtgggtgaataaacggagtccggcgttattccatggcgcgcatggccgtggtgatttccagcagttcattggtgatctgcgtctggcgggccttgttgtagtccagggtgaggccgtcgatgatgttcttggcgttttccgtggcgcccttcatggccaccatgcgggcggagtgctcggatgcgcgggcttccagcacgatctggaccaggccgtggaagacgtaaaggggcaggatggtatccagcagggcggaggggctgggttccagcaggaattgcttgtgggcattttccccgtccagggccgcgcctccggccttcgccatcttcatcaacggttccggttcaatggggagaagctggcggaagataggcttctggaccattgtgttcacaaagccggagaaggctacgaagacgcgcccgtattcctccgccttgaatttctgcacaatgaagtcgaacaccggcttcagttccagcagggagagcgggtccgtcaggctccaggtggcttccagccgttcattccatttggccagcgcggcgttcagcttgcggccgatggtgatgtagtgggcgttttccggagcgtgctcccgggtcattttgatgaggttggcattcaggccgccgcagaggccgcggtccgtgttcaccagcagcaccaggtccgcgccgccgtgggtctgcatcagggggctgttgctggtgtctatttcatcctggagatggtagagcacttccgccagggcgcggacataggggcgccccttcacggcttggtcctgggcgcggcgcatcttggcggaggccaccatctgcatcgccctggtgatctgggacgtgtttttgacggatttgatccggcgtctgatgtctctcaggttgcccatgtttcagtgctcccgtaatcgttagttccaactgagcttgaaggattcaatggcggctttaagccccgcgtctatttccggcgtcagatccttttccctcaggatgctttccaacaggtccggatgctggtccttcatggtggcttcccacgcgttctggtattccttgatcctgtccaccggaacatcgtcaaagtaccccttctgcatggcgtacaggtccgcggcctccagccccagtgatttgggctcatactggttctgcttgaagagttccacgatgcgctggccgcgggccagcttggccttcgtgctggggtccaggtcggaaccgaattgggcgaaggcctgcaattccgtgaattgggccaggtccagcttgatggagccggccagttttttgatgattttcgtctgggcggaggaacccacgcgggagacggaaatgcccacgttaatagcggggcgcaccccctggtagaacaggtccgtttccaggaatatctggccgtccgtgatggaaatgacatttgtggggatgtaggcggaaacgtccccggcctgcgtttcaatgatggggagggccgtcagggaaccgccgccgtgttccttgttgatgcgcgcggcgcgttccagcagacggctgtgcaggtagaatacgtcccccggatacgcctcgcgaccggaggggcggcgcagaatcagggaaatctggcggtaggccacggcatgtttggagaggtcgtcgtagacgatgagggcgtcctcccccttgtccatgaagtattcgcccatcgcgcagccggcatacggggccaggtacagcatggcggcagggtcggaggcggaggccgccaccacgatggagtatttcatggcgcccgtttcttccagctttgccacgaggcggctgatgttggcgcgcttctggccgatagccacgtagatgttgtaaaggggctggtggtccgccagcttgccttcctccgccaggcggttctggtccgcctgggcgatcatggtatccatggcaatggcggttttcccggtggcgcggtccccaatgataagctcgcgctggccgcggccgatgggaatcatggcgtcaatgggcagaatgcccgtctgcacgggaacagtgacggactggcgggagataatgccggaggcgattttttccacaggataatacgcttccgcctcaatcggccccttgccgtcaatcggctctcccagcgtgttcaccacgcggcccagcagggaccgccccacgggcacggaaagaaggcgtccggagcatttgaccaagtccccttccttcaaattggaatcatcccccagaatcacggcgcccacctcatgttcttccaggttcatcgccaggcccatcacgcccccggggaactcaatcatttcattgagcatcacgccgctcagcccttcgattttggcgacgccgtcccccacggaacgaataacgcccacgttttcctggctgacggaagccgtggcttttttaatttctgcttcgagttcttgaagtatgttgctcatggaaaaaagtttcgttggttaattggaaagattgcgggccatctcggccagacggtcgattctggagcgtacggaaccgtctttcacgtcgtcccccacctggatgcggatgccccccagcaggtccggcgccacctcccagtggtagtagaggccgtcgccatatttggccgtcagcttggcttgaatttgggagcgttcctcctctgtcagcggtacggcgctttgaatggtggccgtacggcttttcacggcgtattccaccatgcgggaaaaggccgtcagcagagcgacatagttacggggtttgcgttccgcaattttccgggcgatcaggcgcacgcggtcctccgccacggtattcccgtccatgcagagccggaacagcctgcgggcggcattgagcgtgtcctttccgatcttcataaagcgtatcaggaatccaggctgtcgatcgcttcccggttgattctccgctggtcttcttccgtcagcatttttccggtgacctgcgcggcagccagggccaccagctggccgaattgttctttcagcgcttcgcgttccttctgctgttccagttccgcaagctgccgggcctttctgactatttcctccgccttttgggaggccacggtttcctgttcctccagcaggcgggaggcggcggccttggcggcgtctatcttttcctgtcccttttcgcccgcttccaccagcatttcatgcgtctgttccttcacggaagccagctggcgctcgctttcctcacgcatttcctctccctcctcaatgcgctggcgccttttttccagaacgttctggatgggcttgaacgccaggtagcgcaggatcaccaccatcaggatgaaggcgatcaggttggcaacaaagggttcccagcttgtcaccccgaagggcgcaaagggattccaggactggtcggctatgagattcagcataaaatgaacgggttgaaacatgccggaagttttccggaccggcaggaacggctgcgccgccccggagcggaagaagctccctccgggaacggggcctccgggttatttcacaaagatggagatgagggccacgccttcaatcagggcggccagcgtaatggcaatcaccatgatgggggaggaggctcccgggttgcgcccggtggcttccgcggctttcgcgccgatgaggccgatgccgaggccggcgccgatggtgacgaggccgaagcccacgttgccggacagttcggccagggaggtcattgcggtaggatcaatcatgttattggtatggtttatgttttttgttgaacgttcccccacaggttgcccatggtccggaacggaaagttggcggtgcggcttatgaggcctttccggacggcaggctgtccggcacggatggttcttttccctcatccttggcggcatggccgtgggcatccccgtcccccacttgcagtttgaggaaaatcgccgtcaggaggaggaagaccagagcctggatgaagcccaccagcagctcaatcgccagaaacgggagtacgcacagggcgctgaggacgggtccgaacatgtgagccatggtgtcaatgatcgtttccccggcgtaaatgttgccgtaaagacgggccgccagcgcaataggacggatcgtaatgctcaggacgtccaccagccccacgaagatgaagatgagcaccagcacgaatcccatgaagccgggcagtcttcccttgggcccgaacaagtggatgaagaagcctttcaggccctgttcccggatggaccagtaaagccacatcagcgcataaaagatgcccaggaacatcgtcacgttcatgtccgcattcgccccgcggaacagcggcactccgttataggtgatggtccctaccccggggagaagccccatgtagttgctgaccaggatgatggtgaagatggttccgaagtaccagaagtacttgcgcgtcagtcgcggccccagcagggattccacaaagttgtacagagtctcaaagaaatattccaccgcattctggaaccgggacggcagaatgcgcatggcgcgggtggcgaaccatacgaccacccctatcagcagaaccgccagaaagagcatcagcatggagttggacaccggcagttcaatgccgcctggaagcggaatggagaacaagtggggggcggcctgctccagtccgtgctccgctccttcctccgccgcacacgcgctaccgcccatcatgccgggcaccgccaacgccgccaaccacaggaactggaaaaatctgctcatcgtctatctttcaccattatcgcgccaactcctgtaaatacgggaaaagggaagccattccctttatttgacggttttgattgtgtactctcccctcccccttggcaagcccaaaacttggcacgcgcacaaattatatacatttgtatataatcttaaggcggctgcaggcttgccgttgcaaaactccgttttttcttccgggcattaaaaaatttttccggagataacttccagaacggcaggaacaagaagcttccggaaatttcttcccggaagcctgtaaatccaatgggaaacccctgttatttggcagcggaaataacgtggatgtgatacacgtccctgccgtccgcgcccttgcgccccgtagcatgcacgcccgtgacgtcggaggtgatcacgtccagggtttccacggccttccggatatccttgttgccttccgccgcgctcttcagggcatcacggaccggaacgaggttaagctggaattccagcggagccacctgccccggggccttcatggattccttgacgacttccatgccgaaggccttcggcatgctgatggcccagcgggtgtcggaaacgctcaccaccggattcaggtcggcgcccagcgggcactcgtaatcgtaggtggtgacatccccttccacggaggatttgggggagggcaattccgtcatcttgccctggctggccagggtaacgatggtcttggcggcgtcagacactttctgccacgcttcgcccaaggcggcacggttcttcacttcataagccgcggagaagcgcggggccggaacattcttgagcgtggggctgggagcgccctgcatgtccatgatgaacacgccggaatccgtaaggccggaaagtgcggtcttgtacgccttccaaagttcttcaatggtgggccgggccatctggagcatgggggcaaccatgcggatctggtcgcttacgtcatgcttcgggttggaaatatacgcattgccgtaatcccagccgatctgcgcgatgttttcatacagggtgcagcccatgtcaacaatctgcggattgatgcggaaggaagaatacagcaccgtatccgccccgggacggacggagttcatggaggagggagcgtccaggaggtagaattcaagcggatacgtgcaggcttccacatgcaccccctggtcctgccacgcgtagtaggaaacgggcgtggcattctgcgccaccttttcatacagcccaaggaggcggcccttcatggaatcaagcgcggccatggaaggagccagatcggcaatcttccagtcggtgcctaccgtctgcatcaggtccttcaacccggagaacatgcccttgtagtaggcgatgtccaggttaataaggcccttggcgcaagccttgtccgcaaatatcaggccataggcgggatactggagctgggcgtcagccatggagaaatccggacgcgccagaacagaatcctggggagaagccgccaggcggacctgcttttcaggattggtggttataaagcccacgagggtatcatccacgaaagcgacggccacatacagcttggattcgtccagacgcttgagagccgccttgagacggtccagattttcctgggagacggttatctgggctttagcctcttccagcctttcttccagcttcgcccgcagtttcttgcagtccacttccgctaccttgcaagccaggccgttgtaggtcttgtcatacagggaaacaatgccgtgcagttccatgccttccgggagattggcgtccttcagggtagccttggcctgggcaagggcttccggcgtcaatttggcggctaccattacgggagccgtcgcggcctgagaggggcgcatatccaccaaatcaatccacttaatgagcatttcagtatatctgttgcccattacttccacttctgcgtcactagctttcttgttaccattgattaaatcctggtaaagcttataaccggacagaattcccttcatttggtgcaatcccatgcctgtaaaagcggactgggcgctgtccatccacggagcccattcggggccgaagccgatcatcgcgtcaatgacgggggtgttgacggagcactttttccggacgggcttgggtgcatcctctcccggaatggctatggattcatcagcgtcttccccagcggagcaggaaccccaggttttgaccatgttcagattctgaacgctcctgatcatgccggggacgtcgtaaacaccggctacaatacccatgtccatgggaaagagggcggcgattccgagccgttccgcacgcttcgccaccagatcggaagcaacgggggcggagggatcaagcgaagaagccggggttaagccggcggcatcctgtccggccttggcggaagatgatttattgtcgtcagagcaggcggcaagagcgcaggtcagcgcaaaacagggtatggagtagaaataatgcgttttcattatctttaaacgtaggggtcatgatgccatccaacaaaagcgccgctccttacggcaacagtctcatcgacgcgcaccatccgcattatataggcgcttccccgcaatgacgcaagcacaatgaaaagcattaacgggccaaaggccatgcatgaccctgttacggcgaacgccctgaaaagcattgccggacgattccgccttccttaaaagccggtctaaagaggttccgccatgggaatgtcatcctccggaaggggggcctggggcgcgggagcttttacgggagaggaatggttgagatggcggggaatctgatggggaaggccgggaatgtagtcggaatctccgcgtcggggcgtgaggggtgcggcagaaggctcctccgacaaggaaggcgcggacggcctggcatgcccggaggaaccgcccaccggggtcgccttgatttccgcatcggaagagtcgtccagatcggcagggatttcatgaaccttgatgggctccattccttccggatcatacaggccgggcggcagattgtctggcactacggcaggcgatcccccgcgttcgcgaagggcggcggcagccgtttccggggtttcctccaccggttccgctaccgggatgtcgtccttgggcgggtcaatgatggccttgatgtccttcttctccgtctcaaagaattccttcacgatgggggcggcggcggcgcccccgcccagccgttcgtgggcgcggccttcatacagaaccacataggcgaagcggggattgtcacagggcataaagccggcgaaccacgccaggcgcttgtcttcccgttccggtccccactgggccgtgccggatttgccggcgatgctggaataggacaggcgggcgcggccgcccgtgccgccttcaatcacctccctcatgcccttgcgcacgctggacagggcacgttcataggccggcagggggcgctggacctcctgcggcttgggagcgtaaatgacattggcgttgccgtcctgaatctgcttgatgagctggagcctgggcaggtagccgttcgccacgccggacatcatgtgcgccacctggagaggcgtgaccagcagcgttccctggccgatggaaaggttggcggcgtctccggacatgaaatcccgcttgtagttgcggatcatgtagtcgctggtgggcaccaggccgggatcgtccggaatgggcagcccggtgcgctcgccaagtccgaaggcgcgggccgtatccatcagggcttccgctcccagcttgagccccatctggtacatgaacgggttgttggacatcgccagggcgcggatgcagttgatgtcccccaggggcgtcttgctccagttgttgaaaacgtggttgccgatcgtgatggatgccgggcagtagatctgcgtattttccgtgatcttgttgtttttcagggcgctggccaccgtcagcaccttgaaggtggaggcgggggggtagcgcccctggaaggcgcgcgcgcccagcggtccggcggggtcgttgcgcagggcatcgtaatccttctgggatatgttcggaatgaacatgttcgggtcataggacggcgtggaggccattaccagcacttcacccgttacgcagtccagcaccaccatggcgccgcgcctcttgccgcgggaaaggatgcgttccgcatcccgctgccatttcaggttcagggtggtgacgatggcgccgccgggcttggggcgtatctgaagttcatccagaatcttgttgccgtcctcgtcaaacatcaggcgccatacgccgggcgtcccggtcaggtccttgttgaattccttttccagtcccgcgcggccttccacctgttcccacagcgggtccatatggttgatggggccggtaggcagttttcccttggaacccacatagccgatgatatgtccggcgatttccttttccggataggaacggatgtagatgggcagcaactggaggccgcgcacccccttcaccttgtccttcagtttttccgcttcctccgcgcggatgacgttggtgaggggaagaggcagccagcggcggtgctcatagtgcttccagagctggtcatcggaaaaggaccacgcctttccggcaattttcttggcctgttccaggcagttgcgcccgaagtccaccacgcgggaacgatcgggattttcaaaaatttcaaaacgcagggccagttggtaggccacggaggtcacggccagaggctctccgttgcggtccagaatggggccgcgcggagccggaatcagcagggccatggttctggcggaaggccgcgtgctggtgtgcgcttcccgcgccgcatccatccttccccccttgagggagggaatcagggacagggaatccaggccgttctgctccttctccgtttccttgggcatttccggggcgtcagccacgccttcccgttcaccggacgccgtgccggattccctcttcttatcccccaggtcaaccgtttccacggcgtcatcctctccgcgctgctgcgccgcagcctggcgcacgggcgttcccccgcgggaagacgaatggcgtgacgaggactggccccaggccgtatccgccgtccaggcggccaacccggccagcaataccagggaacgtatcagaaccttcattttcatcagcttgcaggagtgtgacagatgcaccgtaaggaatcaacgattattcacgctcgcgcttattcctgaactactacggttgttcccatgccgcatttgtcaaacaaaatgcggcatgcctccacaggcacccggatgcacccgtgggaattggcgtcccggaacaccgtgcccacatgcagccctatcccgccatgaatgcgcatccacagcggcatcttggcgccgatgaatttgccgccggacggcacgcgggaagaagaggtggcgtccgaattcacgcacaggccgcttgcatcaaacacgctgccataggaccgggagcggtagtccgcatccttctgaatgatggagaatttgccgcggggcgtctcatgggtggatctgccggtgcacacgggaaagttcatggccggctggccgttgacccacagcacgccgcgctggtccttcaaatgaatcacgattttgctgttccgcgtctgcgcctgccggatgcgctcgtcatggtaccagatgtcgcgcgtgaagcggtactgggggtccgctacaaaagcgtcataggaagaagagtacctgccgtccttcatcaacggcttgccatgcggagtcttgggcgtggaggaacaggcagccagcagcagtgagacacacaggaaaaggagaaaggcgagaggggagcgcggcatgcggcctgctttaccctcttcccccgtggaaatcaagcacgattcccctctgttccggcatgtttggaggaatcctgataaagacgcccttttccgtccgtacctgttcccgttcttcctccccgccgccatgaccgcctcctcttccgttcccgcccgttccccccggctgcactccctggatgccctgcgcgggctggacatgctcatcatcctggggctggacgccctggtcctgctcctggcctccagaaatccggaaaacgccttcctccgggaagccgcgcgccagatgtcgcatgcccattgggcaggattgcacctgtatgacctggtgttccccgtcttcgtgttcatctctggcgtttccatgttcttctccctggcgaaatacaccggcggaaactcctctgcggcccccgggcttctccacctttggaaacgggccttcgttctggccttcctgggcctcctggtcaacggaacgcttacctggacggaggatatgcgttatgcctccgttctgggcctgatcggcttttcctgcgccatcgcaggcacgtgcatcctgctgtgccgccgcacgggagcgattgccgctgcggcgggaggccttctgggcctcatcgccctgcttcaattcacctgcggcagcttcacgccggacggctccgtcaactcctgggtggacatgcactggcttcccggccgtctgcacggaggcgtctttgatccggaaggccccctctgcatcgcctccgcttccgccctgtgcatgggcggatggctggcgggaaaatttttgaaggaaagtcgcctgccttccgtccgcctctgcatggcgatgatgggagcgggaatcctcctcttttccgccgcccgaatgctggacggcgcctatcccatcattaaaagcatgtggaccggcaccttcgttctggccgctgccggaatctccctgatgctcctgtccctgttccatctggccgtcgacgcatggaacggcggaaaatgggccaaatgggcctttcccctccgcgtcatcggcgtcaacgccctggccgcctacctcatccacgccctgctcaacgtgcatgaactcaaccagcgcatcttcagcggcgcggcggacttcttcccgcctttccagcccgtattgctcgccgtttcccttctcctgctgcaatggctggttctgctctttttttacaggcgccgcatatccttcgccaaaagcccggccaagtgacggcgtggatgaaattcccggccatgaggccggctctctccggaaaacaccccgtcatgaatattcccatccggagagaaccggacagccgctaaaaacggtggccatgaccggataaacaaaaacgcccctcccgtgcaggagaggcgcttccgaaaaccagtccggacaacaatgcccggctcaacgcatccggcggcggcgcagcagggccagcagaagaccggcggcggaaaggcctgccgcagcaggttccggaactggagccgctccggtgatgtaatgaatcttcacgttggcccaggctcccccattggtggtgatccaatacttgcccacattttcttccgtagcttccagcggaccgtccgcacgggtcaggatattcccgtcagcgtccctgaccacgtagtcaaccgtatcaaacccggagcctcccgaggaagaggaactgttctgccccagcagttcacgcaccgcagtcccgacggttccggtggtcgtgtacggatcaatggcggcctggatggttcccccgctcgcattgatccagaggctggtcgtcgcaagacgtccgtttaatccgaaatcccaaacataccccgtggacagcccgcctcccagcgctcctgaattgatgctggaatcaatagtcaagttgccccagagctgcgtattgcctgagttcagggaaaaagatttgtccatgtccacgttccctaaaaccaaggcccctcccgtattgttgctgagagtacccgtgcctttcagaacaaactggtcgacattcctgtaattcaggctccccgcgccggcggtggagatggaggcgtcactgttgatgatgatgctgtttcccgcgccgagagtagtaggaggcacgccggcctccgtccagttgtccgcgtccgtccaggaggatccgtccccgtttcccgtccactgataggtggccgctgcgcccaggccggacaaggcaaccaggacgcaggaagcagtgaataaggttttcttcataaaatcaaaagttaaatatggatatgaatggatccgcacctatcgccggactgctgcacaaatccgctcccgggagcgttctgcggtcagaagccaagacttggaaccctggtttttctaatatcggattgctaatccgttacggaatagttccaatgccgcatggtgcgccgcaagcccctcggcatccggacgccaacctgtgcagcaatgatttctctttcctgaaattcagtatattccgacggaatatatgtatttccacacccgcaaaggctcgcggctctcaacgtaccgacaacgcaacggaggaagccttttctccggagaaacagactcccattataaaacgaccgggcaacataagcacctttcccttaaaatcagagcttgacgccggattagcaatccgttttccacatggaaaaagaagcaaaataaggcggaaacatcattttttgctcgtctccggcaaatgctttgccatcatggcgcaacggctttttttccgaaaagcagggaagcgaccctccctgccctcctgctagtccatctgccaccttccttaacctaatgatgattcccatgaaagcattcacgttcccggctcttgtcctggcggccctgagcatctggactgccgccgcccaaacccggatatccaccattcccccgctgccgggaaaaaacgcacgttcccttcaggtacctccctaccagtccttctgctggttcgcggcggaccgcggccgctggcccggagacggcaaccgggtgctgccctggttcggccggacggctcccggcaacctgctggacagcaagccgaaccccagcaccgccaaaccgggggaccacgccatgtttgcgctgttccacctcaaggacggcaatttcatggccgtgctgcccgtcgccacccctgactccctcacgtggctgaagcttgacggagacggcaaattccttgtggaatccggcacgctgggaacttccaccgccaaaccgcagcccgtcctggccgtcaccgccgtggacaaggatatttaccgcgcctgctccgccgcctggaacaaagccctttccctccccttcatcaagggcagaacctttccccgggaaaagaaggtttatccggaacccttcaagtacctcggatggtgcagttgggagcagtataaaaagaacatctcctccaagctgcttgaagaaacggccagccaactggaggcctcccccatccccgtccggtggatgctggtggacgacgggttccagacccaggaagggcttaagttgatcagcttccagacccgccaggacaaattcccgcagggctggcagcccctgatgaagcacaaaagctccaagttgaaatggatgggcctgtggaactgctattacggcctctggaacggcatccaccccaagcaccggctggacgcccagacggcccgcgggctggtcagcactaccaaggggaaaatcctccccggtgacggccccggaggagccggggcgttttacaacccttttctccaatccgtcaaggacgccgggttcgacttcgtgaagatcgacgtgcaggcggaatacctgaagcatgcggacggcctggacaacccggtccgccacaacaccaagtgttcggaagccttggaacaggcatgccggaagacgggcctcagcctgatgaattgcatggcgcagggcaccgtcaacatccagaatacccgctacagcgctatcacccggtgcagcattgactacaagctgggggatgaagccatgggcaagtcccacatcctccagtcctacgccaatacgctctggctggggcagaccgcgtggccggaccatgacatgttccattccacggaccccaccagcgcgcgcctcatggccgtttccaaggccgtatccgggggccccgtctacctttcagacccggctgacaagctcaatccggaaaacatcatgcccctggtctggtccgacggccttctgctgcggccgctggcccctgccgtccccctgccggattccgtctttctggatgcgctgaacgagaaccgcctgtaccgggtgatcgccccgctgcccggccaaagcgccgccgtggtgctgtacaacctcaaacacccctccccggcggaaccggtgcaggggaaaatttccctgggggattataaaaacgcggcggccctgctgaacggcaacgcggcggaagcctatgcctccattccggcggagggaatcgccgcctattccgcagagggaggccgcgcgctgaccccggcacagccggacctggacgtgaagctaacgggcttcaaggaccgcctgttcatcatggcgcccatcgtccggggctgggccgtcatcggcaggggggacaaattcctctctccctgcgccctggccgccgctccggaatacggggcggacagcctccgcttccgcgtgaaggaatccggcccggtcgtcgtctggcgcgggaaaagccccgtgaaggcagggaacgttcccgtcaagaacctgggcaacggtttttatgaattgcaattccccgtttccgaccgcccgctggacgttaccgtgacagccgaatgagcgctgccgtcccttcccaaccctctttccttccccccatgcatctgctgcgcccgttcctggctttcgccctgctgttcccgttctgctggcacatcccgtcctccgccgccgctccggcgggacttcccgcaccggaacccgcggaggccaaacaggcgattgaacaattcctgggcctcaccgccatctggatgctggaaatggaatggacccacgcctatgccaataaaacgcccaaggcggaggacttccggaacgccatgctggcggcgggccttcagcaatgccccgctgattttcaggaagcatggctgcggcagacggacaagccggggcgcaattacgcggcgcccgtcctgcgtaagtacggcgtcagcctgaaggacctccgggaacggctccagggcaaactgttcaagatcaattcccgggtgcatccgcccattcccctttacgacgaggatgaacaaatcccccgcatggatccgcgcacctgtggcgaccccaaggccatcctggaagccctggccgccctgcgcgcccaagtcatgggccttaccccggaccaactggcccaggccaggcaatccattgaacgggtcatgctggaattcacgctggcctacatggaaaccgccatctgcatgaacaccgcgggcatccgggaaagccaggtcagggaactgttcgcccccatcaggacggacggatgcccggaggacttccgccgcgcctggcagcacgacctgcctttcttcctcaagggccgcttcacgggaccggaactgaccctctccaccgtctgcaagaaatacggcgccagcgagcaggaggcattcctcaaggtccgcaaaaagatgaaggaatgggatatccagccgcctaccccgcagacgcagcccgccttccgccgggacatgcaggaaatccgggaaaacatgctgggcggccgctgacaggaaagccccacccttgccgccgtgtatttcacgggcggtattctccggtcagcccagcaatccggcgtccattccctcgttatattcccaaatgccctgctccaccatgaaggaactccaactgttgagcaattgctcaaaataggcggcatttacattgaaatggtaaaacgtgtggtccgtcacgtccagaagctcaaatctggagcggtttttctttttccgccacagctccgccagccgctcgctattgcgccacggcagcagcctgtctcttccgccatggctcgcgaacaggggaggcagccctttctgcacgcgccgcaggggattgacggcatcccgctggtcagggggcatcatgcctcccagtttaaaggcggactgcgccgccagatcgcacacgccgcggaacagggccacggcggcaggaccgggcggaaggggagccttcctgcggaacagggaccagcgcgcgggatggtcggggagggccacatgcagggccatcagtcctcccgcatcgctccccgctacggtaatgcgggccgggtccagacccagcagggcggcgttttcatacacccaggcccaggcttcccggccctcttccagaatatccatcggctccacctcataagcgccgcgcgtacggaacatgggaataatccccacaattccctgctgggcaaggtgaagcgcccatggcacaaaatcccccaggctctttcccacccacatgccgccgtgaaaaaacagcacggagggcgcggaagcgccctctcgatggccaggaggaaaaaagacgtaggccatcagctcctcaccgtctgaaaaccgcctccacacaaagccgggctgttcccgcaacagtttcctgtaccgggcttccgccagatgatcggcttccgtgaacaattccataagaacggcttcatgatgcaattgtgttgcactccgcgcaagtttgatgtctaaataatcgtgtaatgactttccgctccattctcaccatggcctgctgcgccgcagctcttctcgcccccgcctccgccgccccccggcccggagacgccaaactgagggatgatctggacgtagcctacaacacatggcgcctgcacctgctgcgcggcaactatgacggctggagagccaccacctccgcctaccgccaggtgaaagtgcgcaacctggccgtctctgaaaaacgcccctttcccgcctccctgttccggcagcccatggctccgcccgcgctcgccccgctgatgtacgtgggctccgtggtggacggtcccacggccgcggccacctactacggcaaggtggacctggggctgggccaggaaccgacggactccaacgccctggtcctgctgttcacccacgaaaacggcaaatggaaatacgaccaggcgcgcttcttcaacctcacccgcctgcccgccgtcaaggaatgcctcaagcgcggcgacgccaccgtcctgatggagcaggacggcttccagccccttggaaaaattcccgccgtgccgcctgtctgcccgccgcccaaatacatcgcaaaaattctggtggactgccccggccgcaccgtcaaggcgaacgtaaacaacatttccccgcatgaattcgacaacacgcgcctggcggaaatcatttccggcgggctgagggacggaaccaactccctcacgctgaacttttccgacagccctaacggcaaaaagggcgccgttctcgtggaggtttacatcatgccggaaatcccgggacaactgcccgccagggccttttcctacttcgtccccccccaggcgcaccccaaaagcggccccgttctgatcaacgtcactccggagctgctgaagaccatggacccgaagaacactccgccgcaggcatccgccggcaaataaaatcgtcattcttcaacgtttccgccgcgggtccggtcataccgccatatgacaactcaacctcaagtcagcagctccgcggtatccggcaactcatggtggatgggtatccttggcgtcatcgagctatttcttggcttcatcgccctggcctctccctggattgtcggggccagcttcatctgggtgatcggcatcatgctgatgatcctggccgtcgtccggctggtccaggtcttcaccgtcccgtcctcccgctggtggaacctggtgacggccatcctgtacggcatcgccggctggttcctgttccgggaccccaatatttccctggccatcaccacgctcatcatcgggtggggcctggtcatcgccgccgtcttccagggggccatctggctccagacccgttccctgcccgccagcggctggcggctcttcaacgtgatcatcacgctgatcctgggcctcatggtcatcttcggctggcctgaatccacggcctggttcatcggcaccctgatcgcagtggaactgatcttctccggatggacgctgctcctgtacgccttcagcggcaactccgcccgccgttaatcccgacgacagcaatgaccctcacccaggaagaaaccgaacggtacgcaaggcatctttcccttccggaactgggcgaacagggccagcaaaaactcaaacgggcgcacgtcgccctgacgggcctcggggggcttggctcccccgcggccctttatcttgccgccgcgggcgtggggcggctgaccctgatcgacccggacgaggtctgcctttccaacctccagcggcagatcctgcatgccacggatgcggcgggaacggccaagaccgccagcgccgccaggcgcctgtacgccctgaacccttccgtccacatcaacacggtccacaggcggctcaccccagacaacgccgtttccctgctggaagggtgcgacctggtcctggacgcctcggacaactacgcggcgcgcttcgccatggcggacgccgcttgcgccctgcgcctgccgctggtgcacggagccgtgaaaggcttcatcggccaggtggccgtcttcgccccccaccagggcaccgcgtgctaccgctgcctcttcccggcagacacgcccatgcaggagaaagacaccgcctccgccgccggcatcctgggcgcgcatgcgggcatcatcggctgcatccaggccatggaaaccctgaaatacctggccggcatcccctctccgctggtgggagccatgctctccgcagacacgcggcgcatgcgcttcaccaccattccgctggcagccaatcccgcgtgcaggtgccggaaaaacggggaccgcggagccgcaatgaaaaattgacggccatgggggcatctggcatcattcccgccagatatgaatcatttaacacgcgccaaatccgtttttgaaatggagattgaagagctgcgcggcgtcctgtcccggctggatgacaatttcaaccaagctgtggaactcatgtcccaggccctggaccgcggcaacaagatcgtcatcgtaggcgtaggcaaatccggcaacatcggagccaaaatcgtcgccaccctgaactccaccggaacgcccaccgtcctgctggattccctgaacgccctgcacggggacctgggcatcgtccaggacggcgatgtctgcatcgcgatgtccttctccggggaaacctcggaactgctggccctgctccctttcatcaaacgctttgaactgcccatcatttccatgacgggcaatacggcctcctccctggccaaatactcggacatcgtgctggacacgggcgtttcccgggaagcctgcccgctgaacctggcccccacctccagcaccacggccatgctcgtcatgggggacgcccttgccatggccctggtggaagcgcgccacttcaccgcgcgggacttcgccaaacgccaccccggcggctccctgggccgcgcgctgctcaccaaggtgagcgacatcatgcgccggggggaggaaatggccatccttccggaaaccgcctccgtgaacgactgcctgaaggcgatgaccaccgcccacaccggcgcctgcatcctgctgacggcggacaacaagctggccggcatcttcacccacggagacttcgtccgggcgtacggagccaatcccctcatcggggagcagcccgtcagcggcctcatgacccgcaaccccatctatgtgatggaagacgacctggccgccgaggcggtgaaggccgtcagcaaccgccacattgacgacctggtggtgctcaacgcggaaatgactcccgtgggcatcgtcgaccttcaggaccttgccaggctgaaactggtttaggctccctccatcattccttccaggcatccgtgattcaaaagtaacaaatcaatcacggacgcctttttcattgaacggaagctttcattttcacaatctaatttccataaacatgttcctgaaatttacgatcaccctgcttgcctgctcctggggctttgcccatgcgcaggacgtttccgccccggcgggagatccggatgcgcccgcaccagaggaagccccccgggaagtccccctgccggacggcaagacggtacccaaattcgaacccctggacgagcaccgcatcaagataggcaacgtgatcgtgaaccacaaggaacgcaccgtcagcttccaggctcaggtcaacatgcaggcgggcattctggaatatatctgctgcatgcccaacggcaagctgcatgaatccctgctggtgacggaggcggaccccctgcacatcagcctgggcatgacgctgctcaaattccaccgctttgaaaaattcttcccggtgcgggatgaaaactttgaatggctccccttcacggagcccaagcccgcggactatgcggactcctacgtgcaggtcgccatgacctacacggaaaacggcaaggagcagaagagcgacttttccgacatggtcgtgaactcccagacccgcaaggggctggaccccaatgactggctttacaccaactccttcttttacgaaggggcctaccaggccagcctgagcggagaagtaatctccatcttcgcgagccgcacctcccccatcaactacatcggcgactttcatgacggcgtcaacgacacgggctggatcgtcaacccgaagaaaaacctgccccccggcacgaacgtcaccgtcaccatctcccagaaaccggttcaacccaagcaatagcacattatgttcaaatccgcactttcattaacgctggccgccgcgctgggcacagccgccttcggccagaccaccgtgacggccgttcccggagaagcggccgcctccaaatacgcctccatcagccaggaaatcctgcgcgccattgaaaaagggaacgaatacctgaaaagcaagcagaacccggaaggctactgggcgcagccgtcctatccggccctgacggccctggcggtcaccgcctacatgcgcgaccccgccaaccagggcaagcccatcccggaatacatccggaaggggtatgacttcgtcctgaaatcccagaaggaggacggctccatcttcaaccgcggcatgtcctcctacaacaccgcggtgtgcatgatggccctgctggccgccaacaaggaggaatacgcccccgccatcctcaagggccgcgcctacctcatcaagcagcagaaccacttcgctccggacaacccctacaacggcggcatcggctacggggataaaaaggcccctcccattgcagacctttccaacacctccctggccctggaagccatttactactcccagaagctcgccaaggacggcaaatacggggaacagccggacctggactggaacgccgccacggaattcatcaaccgctgccagcagaacccagccgtcaacaaggaaccctgggtctccagtgacaaatcccagctcggcggcttcgtgtaccgcccgggcgtcgccagcgccagggacagcaaaagcgccgcgtttgacaaggcggaaccgcccagggcctacggcagcatgacgtacgcgggcatgcaatccctcatttacgccaatgtggacaagaacgacccccgcgtcaagctggccctcaaatggctggaaaacagctacaacctggatgaaaaccccggcatgggcgtccagggcctgtactactactaccaggccatgtccaaggctctcagcgccatgggaatagacaccctgacgctggaagacggccgcaaggtggactggcgtgacgaactggccaacaagctcatctccatccagaagagcgacggctcctgggtaaacaccaacaaccgctggtgggaggcggaccccgtcctggtgacctcctactgcgtgctggcgctggaacagctttaccattccattccccggtaacggacgcgccatcctgacttcaagggccggagagggaggaaatgacctccttctccggccttttccatgcccggaaatgaacgtcccatggaataaaagggtcttttcttcaaccatttcaaattcatggacaccattgattccattaccattattgcggcggcgtgggggttgctggtccttcggctgacgctggccctgatcctgtggccgcacggagcccagaaagtgctgggctggttcgggggagcgggctgggacggcacgtaccaggccttcacggaaaaaatgggcattccccccttcctggccaaggtggctatgctgacggaattcttcgcccccatctgcctggtgctgggcgtcttcaccaggatagctgcgctcgcggtcatcatcatgatggccgtcgccatgaccaagcacgttaaaaacggctactttgccaactggtccgggaaaaaagccggggaaggcgtggaattccacctgctctatgccggctccgccctggcgctgctgctgaccggtcccggcccgtggtccgtggacgcctggtgcatggacatcgtgcacgtcatcttcggctgacggaggcaggtcatgcccggctgggcataggacgtactttccggttctcaaatccgccgtactctggtacttgtgggggtgcagccttccccttcgggaaaggcggctccttttgcctttccaccttcttccgccatgaccagcctgaaacgctcaaaactccggcagtgcaccaactgcgaatgcatcatcaacggagtatgggactgggtggtggaatgcgcccgcgaggcggctgaggaagaacccgccatgcgcggcattctggacgacgtctgcctgtcccgcaattccctggccacctccatctctgcccggctggcacgcaagctctcccgccgggacatgccgcgggaactgatcgaacccctcatccgggaggcgctggcggaaaaccagaacatcctcagccagatcgccaacgacctgatcgccatcgtggaccgggaccccgcctgccgcacgccgctggaacccctgctcttctacaaggggttccacgccatcaccacgtaccgcatctcccactggctgtggcagcacggccgcaccatcatggcccttcagttccagagcctggccagcgaagtctttgcggtggacatccacccggcggccaccatcggctgcggcatcctgctggaccacgccaccagctttgtagtgggggaaaccgccatcatccgcgacaacgtctccatcctgcatgaagtaacgctgggcggcacgggcaaggaggaaggagaccggcaccccattgtggaatccggcgtcctgatcggcgcgggggccaaaatcctgggcagggtcaccatcggcgcctgcgccaaaatcgccgcctgctccgtcgtcctggaaaacgtccctccccataccacggtggcgggcgttcccgccgtcatcgtcaatgactccattccggacaaccctgcgctggacatgaaccagtgcctttgtgactaatcctgcaacggattaggaatccgtcagttactgctaaaaacacggcaaatcccaagccctgcaaaaatcaggggaaaaagcaagctccaaaaagaccagacgtgtcacaatgatttcaatctcaatgtattgaaatttataatacactaaacttcaacattttgagttgaggccggattcctaattcgcatactgctaggatatgcgtttaagattacccttctctctaaggtccgtcctgcttgcgtgcagcgccctgttctctaccgtggcctccgcctctgtttcagacggaaaccttggcaacgtcatgtacgtaggggactccatcacccatggcgtcaacagcggctcctggcgctgggccatgcacaaaatttttgcagacaacggcatcagctataccgaaaaaggtatcatgaccggcaactacagcggcggagtggccgcgggaacctcctacggcggcaggattttccagaatctccattcctccgcggccagcgcgcgggcctatgaaatcgccggcagggcgaacagcagcagctacggacggtttgacggctccaacatcaagaactggctgggcctgagcacggaaaaaacccaggggggaacctacacgggccagacctttaccggggccgacacgccggacacgtttttcctgctcgccggcaccaacgacctcctttccgacaacaacaacagtacgctgcacctgcggctggacggggtcacctaccttctgctgagcgacatggattccatcgtctcctccatccgcaccgccaacagccacgcaagcattctggtgatgaccatcccctgctggacgcagcattccaacgggaacctggctgaaacgcaccaggccgtagccacctacaacgaatccctgaaagaatggggcgcagaaaacgccgccaacggcgtcaaagtcattgacatcaatgcgggcatcattgacgtggcctcctccacccctttctacggggtgcgctccatgttccacaatcccacggcggacgggctgcacccgaacgcccagggggacctgctgatggcgggcaacctggccaagggcatggggtacgcggggcggtccgccgggcaggaaaggaaagccgcccacgaactgggcgtcaacttcggccagacgccctccatcacccagcagacgctgacggccaagggctttaccgccaataacgtcaccatctccaacaacacgatcaacttcaacaaatccggcagcagcaccctcacttacaactggggagcctcccaggggcaggacaagggctacacggtggatttcaccctgcgcctgggcaacggcgccacgggcggctgggacaccacgaacaacttctccctgaatctgggcaacggaacgctgaacatcaatgaagcgtacatccagtggggaagcaccatcctgtactccaaagacatgtccgccaatgcggattccatccgcgtggcctacgtggcgggggacaacgcccacggcctgaacgcgggctactatatctggctgggggacgtcctcatcggggaggcgcagacggcggcggggggcagctcctccggcctcaccttcagctattccggcacgctggacgccatcctgtccaatctggcgctggacggctccctctcctacgcgccctccaccagcggcatcaccggaccggaagccctttatctggcaaacggcggagcttcctccgccctcaagccgggcatgatcgaatggacaacgggcgccgccgccaccgccgtggctacggccggggccaatgccacgtataatgcccgcaacggcaccaactccaacattgccagcatcacgggaacgggaagcaccaaattcatttacgccaacaacggggcctatggcagcgcggacagccgccaggacctgtgggtgacgctgggggaaggcgtcagcagcgataacggctggataggaggccacacgtcgggcgacctgtacggggacatccacctgcgcctggcggaaggggccattggcaaatccacggtattcggcactgttaacgggggcaccgtccacggggatatttacctggaattctcctcctccaccgggacctatgacacctccttcaccaacggggaggcggaccgcacctccgtggcgggagcctatgccaccgccgtgaacggggacatcaccatggtgttcaatgacggcgtgttctcccaccgcattttcggcggcctttacacgggaaacaaaaccatctccggctccacctccctttacatcaacggcggaacgttcatgaacgaaatctacgccgggaacaaaacggacggcaccatctcccagggaaccagcctgaccgtcacgggcacggacgccattctgggcaaggctgacggggacaactggacatggacgctcctgtgcggcggcaacaaggccagcggcaccatcaacggaggcaccgccatcaccctgaaggacattgccgccaccaccggagacggttccgaacacaaatttgacaaatacgccggcaccatcgacggcaaggggggaggaacagtgaacggggagaagaagctcgtcttcgaccactacactaccagcttcctcggaacgctccagaactttgacaaggtgcaggtcaccggaaattcggaccttgcgctggacaaggccctgggcaatacggtcgcctccctgaccgtggatgcaggctccgccctccggttcaaccaggaccagggagccacgctggacatcaccaacaacggcacgattcgcacctcgcacaacctgaccctcaaatccgcagacaccggaaccggaacctattgggtggaaggaggaacgctggacctggccgggcaggccgtctccggaaaaatatccatctctgcgggggcactcgccaatacggcgggactgggagccgggagtgtctccgtctccggcatcaccgggaacgtcaacctgggcggactggacggaagcaagctgaactccatcaacatgggcagcggcacaggaaccatttccggcctgacgggccatgcggacctgtccggctccgacacgcaattgaggctttccgccgccaacatgggcgcggacggcacgggaatcatccagttcaatgacgcggctaattccactctgaccctggggaacctgaccctgacgctgacggcggatgccgtggcgctgctcgccgctccgggggactacgccttccacgtcaccaacgccgccctgcacgcggataccaaccacatcacgctgagcgaatacaacggcatggcgtgggacattacccggacggaaggcggccaggtaatcatctccttcggccagctggacgccatggtcattgacaagggagcttccaaaaacgtcacctccgccagcaccctgggggcaacccccagcgtcaccaacaacggaacgctgaacatcgacctgtccgcggccactgcgccggaagacaaaacaaccaccatccgctatctggccggcacggaagccggtgccgtcgtgaacacgggaacggacagcgacgtgatcatcacgctgctgaatgaaacctccgcagatccggacaaaccaggcaacaccgcttatgcgggctccattgaaggagcggcgcagctcgtcaaggacggtgaacagaggctgaccattgacggcagcgtgaccgcctccgctctggacgtgcagcagggagagctcgtgctccagaacacgaaggaaagttccatcatctccggcgccctgaacgtggaacaggatgccgcgctgacgctgaactccgcctccctggccgccggggatctggcgggctccggctccatcaccctgaacgggggcgccctgctcaccatcgccagagacacgctttcagacctgacgctccacgcaagcgtcaccggctccggcaccatgaaactggacaattgcaacctgattctgggcacggacagcaatctgggcgaagacgtgctgctccatctggggggcggcagcctgcgcctgcaggacggctccacgatcgcgctggaagggctccaccaggagcaggaaaacggcgcgctccacctgggggcaaacggacgtctggaactggcctccaacgacgggaaaacctactccttcaagggggatatcaccggcacgggagccatcacccaccggggcgaaggcacgcagatcatcctttcctccgggaatggcggcgtggacgtcagccatacccgggcgggtggccacctcgtcctgggagacaaggacctggccgcggacggctccatgacctacagggacatttccatcggcagcaacacccgggacgcctccggcctggacgccacggcggacctctccctgatgaacaataccacggccaacacgctctccatcgcctccaacggcaaactatacctgggcggcaatcccaaccagcgggcggtccagctcgtgctgaccggcagcaacggcggagtggcggccgatctggactccggcgcttccctggacctcaccgtcaatacggaaacgctggcccgcagcgcggacaacgcctgggccgccgtgaaggcggaaaacggctccatccgcatcaacggggcggacccatccatcaacgtcaacatttacggcctgggtaccgcgggagactgggccatcctgccggaattcaccatcaacgccttctatgcggaaaacggcctggccacggcaaacggggaaacctggacggcggacatggtgaacctgacttatgccggcttcgccaacctcgtctatgacatcagcaagatactctccgacgacggcaagctgttccaggtccacttcaccaaactgggagacagcccgctgaaggacttcgcctccacggaaaaccagagagccgcggtggacagcctgtgggccgtcacctcctcccccggaagcatcaccccggccatgatggaattcctcaatgccgtgggcaccgcccaggccatgggggacacgggcgcccttcaatccgccctctcctcctatgcgggcagcggcgtcaccgccctgcactccgcccagaagggagccctccgggaccaggtgctccacctgcgcaaccgcctctcccagatgggagcctccccgcagtacatcaacgatgacctgccctgcttcaacgcctggattgaaggggaaggcggctaccgcaaactggatgaccggatggacgaatcaggctacaagctcaacacctggggcggcaccttcggatttgacgtaacgtgcagcgacagcttcgtatggggagcggccttctccgccagctatggcgacctggacgcctacatggcgaacggagacctggactcctactacggcaatctgttcttccgcatccagtcgggccgctgggcgcacaacgtcatcctcacctacggatggaacgacgcttccctggaccgcaccgcaggcatccccggagccggcatgtacgccatgcacggcagcaccagcggcagcagctatggcgccttttatgaaggcacgtatgacctgtacctggatgaaaataaaacctccgcgttccagcccctggtgaacgcctccgtgtacaagagccggatggacggcttcacggaatcagggggcctgggcatgagcgtggacgacatggattccacctacggcaccgtgggactgggggcgaggctccgcggagagctctccagcaacctgacgggccgcgcgtccatgggtgaactgcgggtgcaggttgtccagctcctgggcgaccggaaaaccacggcagcgctgtcgcccgccggcgtgcccggcgcaggattccgcgtgaacggagccagggaaggagccaccggcgtgcaggcaggcgcgggcatcaccattccggtgggttacaccagctccatttttgcggatgtcaatgcggacttccgcagccgcgccaccagtttcaacggaagcatcggctacaggctgactttctaacgggacttcttcaggggtgtgtacaagcggggagcatcgcggccatgctgcggtgctccctttctgattgcggacgtgcctgttcaggcgcggtcttcccccggaatccgggaagggtccttcatctgcccgctgccttcaatgacgtacttgtaggaggtcagctcgcgcagagccattggcccgcgggcatgaaacttgtccgtcccgatgcctatctccgcgccgaagccgaattcctccccgtcgctgaaccgcgtggagcaattatggtagacgcacgcgctgtccacccggctcatgaaataatcgcgggcctttccatcctccgtgatgatggaatcactgtgatgggaaccgtagcggttgatatgctccacggcatcccggacgccgtccaccaccttcacggagagaatcaggtcttcatactccgtagaccaatccctttcctccgcaggaacggcctccggaccgaaaaacggcctgctccgctcacacacgcggcattccacggcacgccggcgcatgcgctccgccgccatcggcaggaaccgttccgccgcggcggcgtccaccagcagggtttccgccgcattgcaaacgcccgggcgctgtgtcttggcgtcgtccagcacgttcacggccatcttcaaatccgctgcggcgtccacatacacgtggcaaacgccgtccagatgcttcagcacgggaaccctggcgtactccgtcacggcgcggatcagcccctttccacccctgggaatgaccacgttcaggaaagaatccagctcgcacaactgccgcacctcatcccggctgccggaatcaagaagctgcacggcgtccgcggggacggcggactccttcagcgcggcgcgcagaacctccgccagaacccggttggtccgcagggactcgctcccgccgcgcagaatgacggcattcccggacttcaggcacagggcggcggcatcgcaggtaacggtgccgcggctctcgtaaataaaaccgatgacccccaggggaacgcgcacctggcggatatgcaggccattggggcgcgtccactcccggatgcattcgcccacgggatcagggagggccgccacctgctccatgccgcgggccatgtgctccacgcgctccggcgtcaggagaagcctgtccagaaacgcggcattgcggctgcccttccgggcctcttccatatcaaggccgttctcccggacaatcttttccgcggcgctccgaacgcctgcggccatcaggcgcagggcctgcgccttctcttgcggctccagggcaagcatctcccgtgaagccgccagcgcggcccgtcccaccggttcaagaggattctccatcttcataacttcatcccttcggtacaaaatacgttccggctccttccgccttcccctccagcagcagcgcgatgcgttccggatggcggccgtgcagcatgtaaacgcccgtccccgcattcacggcctcccggatggcctggagcttggcgctcatgccgcccatggaaaagcggccccggtcctcctccgcgaacgccagcacggcatccacgtcctccacccggggaatgatggcttcccggctgcctccggggggatacaggccgtccacgctcgtcaggatgaacagcgcgtcagcctccaccaggcgcgccatgtgcacggaaagaatgtcgttatccccgaacttcagctcttccacggatacggtgtcgttctcattcacgatcgggatgatgcctccgtactcaaacaggcgcagcaccgtagcctgcacgttgtggcggcggcgcttcaaatcctctgccgtcagcaggagctgggccacatccacgtcaaaatggttgaaaagattctcatacgtctgcatcagccgcgtctgccccacggccgcgcaggcctgcttcagggacaactcctgcggataggacggcagccccaggacggacacgccggaccccacagccccggagctcaccagcaccacctggtggccctgctgcatcagatccgccagcgcgctgaccagatgcacgatggaagaaccatccagcttcccgttctcacgggtcagaacgcccgttcctactttaactacgattttcatgtacttctgccctctatgatataacaggctctttcctcacagaaagcagaaaacgcgttcttcccgcaatgccgcggttccgctggccgcgcagggattccagccatgaaaaaacctcatttccgcgcgaacacgtccctggtgcagtcatcattccacacgtattcgagctgctccgctattccctccgcccgtgacctgccaaaccggtcgctcacaaacccgagggccatgtccattccggcggaaacgccggaggaagtataaaacttcccgtccgccacccaccgggcacgttcctcccagccgactgcgccgcggacggacttcacccatgcaaaagacttcttgttggaagttgcccttctgccgtccagcgcgccgcaggcggccagcagcgcggcccccgtgcagacggacaggcaatactccgcatcgtccgccatgccccggagaaaatgcaggaaaggcggaaaaaccgccaggcggcgggtcccccttcctcccggaaccactaaaattccgcagccgtccgcctccgtggctggttcagtgacaattaccgtcttttgagcacttgcgacggttccgccatgttcggaaaaataacgcagccggtattcctctactttgcccagcacttccaccgggccgaatgcatccagcgtctcaaaatcatcaaaaagcaacacattcacatccaccaggccacattaccccatccgtcctccctccgcacctgatatttcacgattccgtgtgctgcctgccggaattcacggccatcaatcccctggctgcgtcaaacgggtaaaaaacgggcggaagcctccccttccggagaaacttccgcccggaacacccaaatttgattatcccttgaacatgccgagggccttggccactccttccccgtattcggggtcgcactgcatgcagtggtcgatgtgacgctgcttgataaagtccggcgcgtcgcccatggcgcgggcggtattgccgtacagggcctccctctgctccggattcatcagccggaacagggcgcggggctgggaataataatcgtcgtcatcctcgcggaaatcccagtgccaggccgcgccgtccagctccagcggcggttcccggaactccggctgttcctgccactccccgtaactgttcggctcatagcccagcgtgcttcccgcattgtcgtccacacgcatcatgccgtcccggtggtaactgtggaacgggcagcggggggcgttcaccggaatctggttatggttcacccccagcctgtaccgctgggcgtccccgtaggagaacaggcgcccctggagcatcttgtccggggaaaagccgatgccgggaacgacgttggccgggttgaacgccgcctgctcaatctgggcgaaatagttgtccgggttccggttgagttccagcacgcccacctccatgagggggtaatccccgtgcggccataccttggtcaggtcaaacggattgaaggggcatgccttggcctgctcctgggtcatcacctggatgtacatcgtccagcgcgggaaatccttccgctcaatgctctcatacaaatcccgctggtggctctcccggtccttcgcgataatcgcttccgcctccgcgtccgtcaggttcttgatgccctgctgggttttcaggtggaacttcacccatacccgctcattgtccgcgttcagcatgctgaacgcatggctgccgaacccgtgcatgtggcggtaggaggaaggaatgccgcggtcgctcatcacgacggtgacctggtggaaagcctccggcagggaagtccagaaatcccagttgttccgcgcgcttctcatgttggtgcgcgggtcgcgcttgatggcgtggttcaggtccgggaacttgagcggatccctcaggaagaaaaccggggtattattgcccactaggtcccagtttccctcctccgtgtaaaacttgatggcaaagccgcggatgtcgcgctccgcgtccgccgctccccgttccccggccacggtggaaaaccgcaccagcaggtcggtcttcttgccaattccggaaaacatggcagccttcgtgtaacgggtgatgtcccccgtcacggtaaacgtgccgaaggcgccggagcccttggcatgcatgcgccgttccgggatcacttcccggtcgaaatgggccagcttttccaggaaccagacgtcctggagcagcatggggccgcgggggccggccgtgagcacgttttcgttatccggaacgggcgctccgacggaggtcgttaaattcttttggtcactcatggtgtcttttagttagaattattataaactaattttttcaagggtgtcaacaaagtttctttcaaatcccggaaaggcaaacaacttgcttgcggccttcctccgcgggacgggaaaacggcgcatggcgtaccccatgaagccaagccctcccggcggctgcctccaggcaacggggccaaggccattgcgccattttccgcttgaccctgaatggagaatccgggagagtgcctttctcgatgaagaatcggggctttcctcatgaaccgttttcttgcaacaatctattgcaacctatctctttctccgcaaacgagaaagaagcgccgcgtccgcctgggtttgaagacgggaggggaaggttatgtaaacccggtaggaaaccgcatttttctcattcttccttccggcgaaaaacagcttgtcgagccgtaccagataccggggtccgtccggctgaacattgagggagagcacaacacgctcatcttccatgctccgctctccttaaacaatatctccatccacatctggaaacatgtccgcggcgcgaaaatcgaattcggctcctcgtcgtccgggcacagccactggaacaatgtcagcattctggcagctgcatccggaagcgccctgtccatcggccattcgacgagcatcgaaggattagcggtcatgcttgtgggcggcaaatgccacattggcaacgattgcatgctgtcctccggaatcaccatctgggcaaacgactcccatcgcctgatggacgccgacacgggggaactgctcaacgaccagccgcagggcgtcctcatcggcgaccactgctggatcgggcagggggcaaccttcaccaaaaatgccatcatcccggcaaatacggttgtcggcctgcaatcggtcgtcaccaaatccttccgggaggaattcaccgctctggcgggaaacccgaccaaggtcatcaaaaacggggtcaaatggagccgtgaaagagaaatgggctaaggacgcccaacacgttcctccgcagcttcatggcctgaaccgcctgcgcatgccgggccatgtgccgcagggggcgccgcggcatgcggaccggagatgcccggcgcttccatcttcaatgcttttcccccgctccgccctgttgccggagacgcattttaggcttccaatatggggctgatctgctcatattgcccgggcatgaatcttgaccttctccaaaaagccgccaaccaggcgcggggacttgccatggatgccgttcacgactgcgcatccggccacttgggcctgccgctggggtgcgccgaaatcggggccgtcctgttcggcgatctgctcaacatctgccccgcgcagccccgctggctcaaccgtgaccgcttcattctctccgccggccacggctccatgttcctttacggctggctgcacctgtcgggattcaacatcggcattgaagacctcaagggcttccgccacaagggctccatcacgcccggccacccggaattccgggatacggaaggcgtggaatgcaccacggggccgctgggccagggcattgcgaacgccgtaggcttcgctctctccgccaggcgcgccgccgctcggttcaacaagcccggcatggacatcttcacccagcacatcttctgcctcacgggggacggctgcctccaggaaggcgtggcccgcgaatccctcgccctggccgccgtcctgaagctggacaacctcattctcatttacgattccaacgacatcacgctggacgcccctgcggaacgcacccagcttgccgacccgcgcgccgtgtatgaagccctgggctgggacgtgcgccagatcgacgggcacgacctcaaggccatcgcggaagcggtggaagccgccaaaaacgccaggaacggcaagccccagctcatcatcgccaaaacggtgatcggcaaaggcatccccggcattgaaggcaccacgaagggccacggggaaggcggagccaagctccaggaagaagcccacgccaactggagcattcctgccggggaacgctattacgtctccgaagacgtccgcagcgccttcacggacctcaaggccagacgggaagaagctttcaacgcctggaacgccacctacgaacaatggcgccgggcttatccggaactggccgcggaactggactccggcatctgcgcctgcgccaggggcgtcaatcccgcggactcggacaaggccatccccgccttcccgcaggactacagcgacgccacgcgttccgccggagccgtcgccatcaacgccatcgccaaggcggacccctggttcctgaccaccagcgcggacctgtacagctccaataaaaactacctttccggcgcgggggacttctccgcggaaaccccggaagggcgcaatttctggttcggcatccgtgaacatgccatggccgccatctgcaacggcatcgcctatgacggcctgttccgcgtgagcgccgccacgttctgcgtctttgtggactacatgcgcgccgccatccgcgtggccgccctcagcggcctgcccgtcacctacatcctgacgcacgattccgtggccgtgggcgaagacggccccacccaccagccggtggaaaccgtctccggcctccgcgtcatcccgaacctggacgtcatccgcccggcggacccggaagaaaccgcaggagcctggatggccgccatgcagcgcgccgacggccccaccgccctcatcctgacccgccagaaggtagcgaccctgaacaatattcccgtggaaacgcgccgggaaggcgtgctgaaaggcggctacgtagcccggaaggaaaagggaaccttgaaggccattatccttgccagcggttccgaactggaactggccctgaaggcggcggaaaaaaccggagaaggaatccgcgtggtttccatgcccagcttcttccgctttgacaagcagtctgccgaataccgggaaagcgtgcttccctcctcctgcgcgaagagggtttccgtggaagccggcgtcacggacctctggtggaaatacctgggctgccagggcgaagccgtgggcatcaaccgcttcggcttctccgcacccggagcgcaagttctggacgagctcggcatgaacgtggacaacgtcgttgccgccgtccaaaaggtgctctccaaataatctgcggcgtttaaccgccattccttttcaggggctgtcccgcatccggcggaacagccctttttcatgacccgccagaacatcccccggaaaagggttgatgaaaccccacccaacaccccctctgcccgcaagctccgtctttctccgtatgaatatgaactggccaacccattaaacccggctatttccacatgccgcggggattgtgcctccggcatcccggaaaggaaggcctgcatcattcatcctctggatccactcaccaggcggttcaggataaaaaatggacagccttcaccttattcccgcgacaccttcagcctcaggaaccgccgcgtcggcgcgttgccgtcaatcactatgggatcaaggtattcggcacggtctccggatggctcgaccgtcgcttcctccctccaggtaaccaggtcttccgtgctttccacgctgaacgtcacgtccgtggccgccgtattcaccggccattccagcaccaggcggcattccccgttttcctccctgaccgccagcctcgtgacgcttccgcagggcttgttcgggtccagccccgcggcatacttcatcaggttggtgatgccgtcgcccgcgggacaggcgtccgggacagtctggtcctccggcgttccgtcggcaaaatggtccttcttccattggtcatacggggaaggcgtacgcgtccaggctagcaccagggcgctttttcccgccgtattctcctgtttcagggaaaaagaaccctcactcttccaggcttccgcactggcggcgtcataggaaacggagggaagagccgccatggaaagagtggtcccttccaccagcttccagctctgttcctgttccttcccggccatggcagggagagccacgcggatttccgccgtgctatccagagacactggcccctccgcgctccacttggcctcctggctagggttccgggggagagagaaggacaggcatgcccctgcggccacgtccagccgcgtcattccgcgcacgccggcgttcgtgccgagccgcaccgttccgccttccacgctcaccggaaaatggcacaaggaaatgccgcctaagcccagcgttcctccccccgtctttctcaggctggaggtggaggaatacccggcgaaggaataaagagggtcttccatgctgaccaggcaatccgggtccgcatgcatcaccaggcgcacatggcccatgaccgtgatggaattgggcacgccgcccgtggaggctcccgcggaacgcccccggaaattgccgctgaaggaaacggggcgggaggaatccgtggaccggaggttgagcacggtgggagcctccgcgctgccgccggaaacgtaaacggcgccccccaggtttccggcgctgtttccggtaaaggaacagccgccttccacgttcacggtgcgctcctcctccccgtcattggcatccaggcacagggcgcccccgttgtgggccgccgcgttgccggaaaaggaggaacccgccgctacctgcacgttcccgcggctgtagagcgcgccgccgctgccaccctccgccctgttgccggtaaaggaaacggcggcctgctggactacggaacctgcgtaaaccgctccgccctgggagaagccgcgcaccgtgttattttcataggaggcggagccggaaaaagtgacctgcccgtaatccaatatgccgccgccgttgcccgtcttgtccgcattgctggagccgccgccggcattgaccagcacatccgccagcagaagggccccggagaggaaggcggcggacccaaggccaatcctgagaagacgcagacgaccgggaagaacggaaaaacaacgtgttttcttcatgagtcttgtccagttggtgaaaagtttattgccggatgggaacgaaggaggaagcatcatccgggtccgtttcaccgggatcgatgacgccgttgccgttggcgtcctccacaaggtcgggaacgccgtcgccgtcggaatccacgtccgggaaatcaggcatgcggatgtaggccgtccccaccgcctggccgttcctggtgaggacgggatattgcgcatccgcctgacggagttcccggatcagggagcgcgccatgcgcatcaggcgttcctgctgcgccgggtcctgggccaggtcattgctctctccgatgtcgtctttcagattgaaaagctgccacgggaagcggcccgcggtcctgtagccgttgccggaatacaaatccgtatgggcgtactggtccatgtaattgtaaatgaccttccagtctcctttccggtaggtggaatagaaattggcgtaggaatggtggtgcgggaaatgctggaatatcttctgggtgcggtggaaggaagaatccccccggaaatagggactgatgtcctccccgtccacctgatggcccaccggaaccttcagcttcagcatattcagaatggtgggataaatgtcccaaatcgccacgatgtcatggttcacggaattctgcggaatgggatattcctgctggatggggctggaggaatcgacctccgcccagcccacgatcatcgggatgcgcgttcccccttcgtaacggctgcctttgcgccctctcagaggagctacggcgctgattttctcaagccatggaatatctccgctatagctctgctggatgggagcgtctccgccgttgtcggacatgaaaatgaccagcgtcctgttggccacgcccagttccttgaggtaatccatcagatcccccagggatttgtccatgccgccgatcagggtgccgaaattgcggagattgccgccaatggaaactcccggttcaaaggacgtgcccgagggataagtatcgtagtccccgttggggtccggctggtcgtgccgctggtggacggcgtaatgggtcatgtacgcgaagaaaggcgcattctcatccacggcggccttgatctgcttcttcatctccagcgtcagggcatttgtcaggaaattcctcttcctgtcttccgtcgcagtggttccgtaatattcctccaggtcaggaacatgggtgttcccggagccgaactgatcctctccccggtaggaggcgggctgtccggcggagcagccggctatgttgacgtcaaatcccaggttggctggattggaataaagctggttggacggggcgaagtgggcctttcccaccgtgatggtccggtagccggcatccttcagcacgcgggggagaggaatttcctgctggctcatccctgccatgttccactggggagcacggatgtggggaagaccgccgctgtattcattcagcgtgggggcattcacggccgtccagttggtgacccggtgacgggcggaggtcttgcccgtcatcagggacgtgcggcccggagaacacaaagggcacgaataggcattcgtgaacttcatcccctgcgccgccagcctttccatggagggcgttttataaaaggcgttcagctccgtaacgacgggctggccgtccttgtaataaaatggcacggacgtatcctgccagcccatgtcgtccaccaggaacaccaggacgttgggcgtgttctccgccagcacggaaataatcagggacttgctcttctccgtgccgtccgccgcggtcagcgtcagcgtgtactgcgtcgtctccgcgggagacacctgaacactgccggctcccgccgtgctggtgatgggaatctccgcgccattggcggtcagggcgaggctttccgctttcaccgtgctccatgtcagagtggctttctcatcactgccgggagcaaccctctttttgtcggattcaaagagaaggatttccggttcctgcttcctgacggtcaccgtcacttcttccttggaaacggttccgtcctcacaggcggcgctgagaatgtaggtcgtggtggcatcaggctttaccgtgacggaacccgtgccgtcttccgtagtggccggaatatcccggccgtccctggtgctcagcgtgaccgctccgcacttccaggttttccagctcaggacggctccggaggttgaatcttccatgacctctgaaggagtcgccgtaaaagtcacgatgccgggagaaggagccgtcaggcggaccgcattgatggcggaacgcgtttgggaggccccgttgcccgtaatggtaatcgttcctccggtgaccggcacatacttcagcgtcagcttgttgcctccttcctgaaacgcgccggaaaacgtgccgcggtcctggatggtgccggtgaggccgttaaccgtataaagcatgtcccggtccgagtcattgcaatccccgtaaatttccacatggcagtattccgccatggaatcgggaagccgggaaatcacgacgttttccgttccccggataccggcccaggaatccatgagcaaataatcacggttcctgcccgacgcaaaaatgccgttactggcgcaataacccggattgatggcgcaggaggcttccgtggacactcccgccgcagttttcaaggaggaaacggtcgtagcggcattcgccgcaggcttgatgaaattccatgtttttccttcctccgccagggttccgggctccgcctgccggaacgccgcctccgtggccgcagttccgttcagcactcctatccctatttcttccgcatgcgccagggagcaggcggccagcacagccggaacccatccgcaccaattcagctttctcatggtgatttcctcttccgtaaacaggaaggcgccgactgttcctttcgcgaacggccggcgcctgcatgaagaacaaacgttacgcgcgcctgcggcgcatcagcagagcgcccaggcccagcaggccgaggctggccgtggccggttccggaacggaggtcagcgccagggcattgatgttgccggtacctccctgggactggatatcaagccgggtgccatccgccgccacgtcaaacgtgtaagtaatcagcatccagtccccggtatgcgtgttgcccgtgacggtggcgccgttcagcgtagcgccggacccggtggagtagtcgtccaggctggcggaaatgttggagattccggtgccgtcaaggctgaaggaagaagtgttgcccgcaccgtaattgtttccgcgtcccaccagcatggtcagcgtgtaggtgccggcggacaggttgttcagggacatcgtgaaattgccgttcgcggagcctatcggattgatcgcgccccccatcggattgccggtagtcatatcctggccgaaaacatcgtaaaacttgttgccctggcccagggcggaccctttggcagcggcatcggtcatggcgccgggacctccgcagcagagtcctcccgtcgtcagggtgattccggtgcttcctccccccgtagtgaccaaggttccggaagtataggaattactctgtcccgtggaaatcttgttcactttctgtccgggttctcccagatacgtgccgtccacaacggcggtgccattgcctgaattgatcccgaacgagatcagaacggtggaggcttcggccgccaccgccgccgcaaccatagttgccagaatgaataatgttttcttcatggtgtcaatgggatatgtgattggaaatgatgaaacaccgcttccatttcttgacaaataacgaatttagaatccgttatgaatgttaaaagaaaatctgaaaaaatatactgcgcatctcattgaataccttaataagccgttttattttttgggccttgaaaaatgaatctttgccggagagattgtccagcccattcaaacaatagtctgtttgattaaggtattcatactaatgaaataataatccgaactctggtctttattgttgaccacggattctaaatccgtgaaacaatggaaagtttttccatgaacaacaaaaaggccttagtcaaaagggaaagcaactctcttaaaaattaaaaagcggcttcaatcttcgtaatggtgaacactttcttcttgtcgccgtccatcggcacgatcttcacctggtctcccacgctcctgcccgtcagctccttgccaacctgggaaagataggagacaatgtgcttttccggattcgtatcccacgcgcccagaatggtgtacaccacggcatcccctccggccaggggctggagggtcaccttcatccccatggcggccttggaggtatccgtcacggcaaagtccgtgccgcgggccagggccagcgcctgctccagttcggaacggcggcggttgagcaccttttccacttccttggcatcctggtagccgccgttttcacggaggtctccctccgcacgggaaatcttcttgttgtgcaggttttccggaatcttcacattcaccagctcttccagctccttcttgcgggcttccaggctgtcccaggaaacgaaaatcggttccggcttgtcggaggtatccaccagggcgtccagcacgatggcgtgcaggtcagggaacacgctgatcacgcgggccatcagcgcaccgcggtcctgttcggagaaggcggaggtattgtacagcatcttggcgaactggcgcacttccgccacgtcctgccccttgatcatttcctggatgatgttcttgtcctccatgaacaggtttttcaagcgcagcatgcggttggggccgccgtccatgtggtcctgttcaatcagggaaagcatcgcaatgccgacgggaaggccgaagaggggcttggaggcgtcatgccgctggcggcatatccagatgagggattcagccggaagagtctggcgcagcagttcatgcttcaaatgcttgaccagggccttgtcatgcccttcctctatcaggaacttggcaatctctcccacggcgcgggcgccgctcgcgtcaaacagctccagcgccttctgcgtccactcttctccaaagacggcgggcagcgtaacgtacacgcgcttctggcgcacggcgggcatggaattgagcacttccgcgaagcgttccacatcgccgatattggcttctacgatggagcggagggggtagacggcctgggccgcttccgtgttcttcacggcggcgatcaggtcgtcccggagcacggccagctccagcacctgctgaagagccaggcttccgccgttgcgcacgtcggcgtccaccgcctgaaccagggcgttgacggcgtccggctccgtcatgaccgtttccatcttgatgccgtccagcacgcgcaccttggctttcaggtccgcggccttgttgtaatcctccagggcggcctgggcgcgggaaagaatattcgtgcggagcgtgatgcgctctcccttgcgggtaggcatcatgaactggacgttggaacggagcatggcgcgcaccttgtcccaccagttcttccatttgtccgcggcaatcacggtgcctttcagcgcagcttccagcttttccggggtaagggaattgccgtagccctgcaaggtgacgcgcaccagttccaccggatcgtccacggacaggttgatcagggattcggtatcttcataacgcctggccaggaaatggtcatcatggaggaactccaaattttttggagcaaattccaaggcaacttcgtgttccggattttcctcaaaatcaataaccagctttttggcggccaggttccaggaaatgactttgccggcgccccaggtggtatggaagcagtaacggccaggtgcgatgcgatcaagtttttcagcgagagagggggtgattttccccagagacaataatttctccaagtcggcgtgcatactaaagtgcatgatacgcgcacccctaccggtatcaagactaaattcccgtagaggcacacggccagtgcatcaagggctgcctgaaccccttccgcctaccagtcaaaacggctcccattgattccaaagcactctttgcgggggtaccctcccgccggcggagtcttcccccgcaacacatcgtaatgcttcatgatataccccgcactgtccttcacgctttcgtcctggtatgcgctgtacgcacactccagcagcttctccacggtttcaaacccctcgtcctgcggcatcagtatcctggtttttccgtccatcccgcggatgatcaccatgtccagggaatccgggtctgaatcccccgccgccttcccggcggcaatctccccggaagcggcatggtccaggacccggatgatcagccgggacaaacccttccccatatccatccacccccgtttcaccctgggtgaataatcccggcccacgcccccggcatccatccagaatggttcgccttcataaggaataaggcgcctttcaggagttccttcaaaaaaccaattgcaatacatctgggcaggattcaaattcagggaagaagcccggactatcagcgttccgtccagataaaaaccgaactcctagtcaaaggaccccaggtaaatgcaggcatacgtaaaggggggattttccgggaaaagcatttcccaataaacgccggcgtcaccccaataggcctcttcccaagcgcatgcgaaatattgggccgggtaaatgagagtcattccttcttctacctcctcatctgccgccgatggaaaaggaaccagcgaaaaagtcatccagaagcagagcagcagtttgaacatcagtatttttttaaaccagtagaataccatgggcaagttaataaaggcaattcatctccggcccttccgctgcggagccctagcccggacgtttccggaaaagacacagggaaaatccccccggccccggattaaaaccaccaggcccggccacccctgctgctccacaggccgctttcacggcgatattcccgcgccccttcctccggcgttcttccctgcagcacggcacgcttctcaataattcccttcaaataatcctcatcgcaagtgaacagcaggtccatggtatacaataaatccatcagctccaccacggttcccaaatcagcatcagcggcagacatgatcctctccgttccgtcagccccgcgcacgatgcaaaagccggtatcgtccacgtgatgagccgttctcccttttccggacaccagctctcccctggcaatcccggtgagcaacccttccatcatgccgcctatctccctcccgacgatgagccactccctcttcaccctggcttcacaatccccctccgcatccggaatgccctcataagggaataactccctttccggtacccggtgaaaaaaccagctgtcataaacctcccagggatgatgtgactgggattccgcacgccccatgagggggccatccagataaaaaccgcagatgccgcgcccgggaagcaaacagcacacggcgggcttcccctccgtccccgccgggaacaaatccttccaaaggggatttgttcccaaaggcttcagaaaacgctcccggaacccacggacatatttttctcccgaatacggggagggcgctttttcttccggctcctcttccgcagctgcaaactccccgcgcatgcttttttcccgttcccgggcggcctcatcctgctccattcgtttccaaacccgtttactgaatccctccacccattcactggacaccatgggaggcggctcgtcacccgcttctgcggcatacttccggacggcggcgcactgcttcatcacccattgctcccctgccggggtcaaatcatccatcatggccatgtctgccaatccccaggccagaaacctcatggccggcctcatcctgccttctccccggcacaggtcttccgccatagcgccggactccccgcggaagtagcagtaattcccgtcgcacccggtcacgtactggcggtacaggtccatggggaaagttctgcgagtgaccgcttcatcccacgttttgcgaagttcagccgctacggcagggtttaatgccgtccggcctcttttaacaaataagcgactgtaaagaacaggattgaccacggcctccacccaggcggcagagagctcacgatattcccggaattggaggaaattcagaaccatatttcttttacgcccggcaaaagggtcttcttccgttacggtatcggcaacacagtcccatccctccaaaagattccctaaaacgggaaagtgcaagcaggtcagcagcacggcagcctgtttcatcccgggactccggaaatccgccaccggaaactgggatagcatctgcatgctgcatggcccgatggctctggcccagcacagttcgttcccgtccagataaaagccgaattcacggtcaaacgaaggaaggtacaggcacgcataggcaaagggcggattgtccggaaaaagggtcgtccaatagcggctgttctgggattccacggcaaaatactgaaccgggcatcttagagtactccaactttcaacatcggaatggcaggtgtcctccgcccgggacggaagtgtgagagcgagagccgtccagaaacatgcagccagtttgaacatcaatcatcttcctaacatccgcggaaacaggtggcaagttgattatgcttttttcattcagaagaataatggccgccggtttgtgccggatttcagacattcacctccgtggctctccggaaaagacccgagtccagagaccggaaaaccgggtttgcccggttggatggcccttgtcaattccttccccatgggatagccgcaagggcgtgcggaggcgcccccttccttcgtccagttgcggcttgaccgtgcggaacgtctggcgtaacatccccgcacgcattcaaccctgcgcaacacgtatcatggaacctatttacgaagggaaggccaaacgcctttatacgactgacaatcccaacgtcctccgcatggaatacaaggacgacgccaccgccggaaacggagccaagaaggcccagtttgaaaacaagggcaggatgaacaaggccatcaccctggtcatttaccgcatgctggaaagcaagggtgtgaagacccacctggtcgcggacgtggacgacatcaacatcgacgtgaaaaaggtttccatccttcccctggaagtgatcgtgcgcaacatcgccgccggctccttcagccgccgcatgggcgtcaaggaaggcacccccttcaagaagccgatcgtggagttttcctacaaggacgacgacttgggcgatcccttcatcaatgatgattacgcccgtgaactgaatgccgccacggaagaggaatgcgccttcctgaaggaccaggcccgcatcgtgaacgacgtgctgattgatttcttcaagcaggtgggcctgacgctggtggacttcaagattgaattcggccgtctggcggaagatccctcccagatcgtgctggctgacgagatttccccggacacctgccgcctgtgggacatcaagaccggcgagaagatggacaaggaccgcttccgccaggacctgggcaacgtgatggaagcctacgaggaagtcctctcccggctccagaacaaggcctgagccctttcccctttcatgggagccggttgtccgaccggcccccatttttcattttaccaacattcttgagcgatatgaccctccactttgaagttatcagccggttccaggccgccgccaacgcggacgccctgctctacactcccctgaatgccggcctcaccttccgccgcagccgcgtttacaccgtagaaatcagcggggacgaacaaaaagcccgcgaatatctcctgagtgtactggtggaccccatctcccaggaatgcacggaacaggccgcccccatcctgaaagactccctgttcacgattgactacggcatgaaggccggcgccctggacctggaaaaggaagccatcctgcaaaactaccgcggccgccagaacatgggctttaccctggacggcctgaaaatcacccagcgcgtgtacgtcttcggccagggggacaaggaagccctggcggcgcgctttgccaaggacgtctgcaaccccgccattcacaactggaccatcgcctaacccctctccttccccatccacatgtccgccaaaacctaccgcaccgttcccgtgagggacctgagcagcgacgaactgcttgaactcagcaaaaagcagaagctttccctgtcccgcgaggacatggaagtcgtccagcagattttccgcgaaatcgaccgcgaccccactgacgtggagctggaagtgatcgcccagacctggtcggaacactgcaagcaccgcatcttctccgcctccatcagccacagcgtcaacggaggcgcgccggaaaccgtggacagcctcttcaagacctacatcaagaagccttccgaaaagatcatggaacgcaagccgggcttcgtgctcagcgcgtttgacgacaacgccggcttcatcgccctggacgacaagctggccgtctgcctgaaggcggaaacgcacaaccacccctccgccattgaaccctatgccggggccaacaccgggctgggcggcgtcatccgcgacattctgggcgcaggcaagggcgccaagcccatcgcctccctggacgtcttctgcttcggcgctccggacacgaatccggcggacatcaccgctccggacgtcatccaccccctgggcatcatgcgcggcgtggtgcgcggcgtgcgcgactacggcaaccgcatgggcattcccaccgtgaacggcgccatccagtttgaccccacgtacatttacaaccccctcgtcttctgcggaaccgccggcgtgattccccgcggggacatcctgaaggaaatgcgccccggcctcaaggtgatcgtcatcggcggacgcacgggacgcgacggcctcaagggggccactttctcctccgccgcgctggacgaagcctcccacgaagaggacttcaccgccgtgcagatcggcaacccgattgaggaaaagaaaacgctggacttcattctggaagcgcgcgaacgcggcctcatcgtcttcatcacggactgcggcgcgggcggcttctcttccgccgccggggaaatgctctccgtcacgggcggggaaatcttcctggacaacgcaccccttaaggaaccgggcctcatctcctgggaaatcttcctgtcggaatcccaggaacgcatggtcctggccgtggaggaaaaagacctgccggagctccagaagctggcggacaccttccagacggagctgaccgtcctgggccattccgacgatacgggcatcctgaaagtctggcacaagggggaactcgtctgctgcctggacaactccaagctgcatgacgcccccatcaagaagctggaatccgtcttcacccccggcaagggcctcacgggcctgcccctcccggacaaggacctgaacaaatccctggaaaccgtcatgggagacttcgccatcgtctcccgcgaacccatcatccgggaatacgaccatgaagtgcagggcaacaccatcctgaagcccctggcgggcgcacaggcggacgccccgcaggacggctccgtggtggacatcgacggctcggacaagtgcatggccatggcctgcgccattcttccggaatggggcaagacggacccctacgccatgggcaccggcaccgtggacgaatgcgtgcgccagctcatcctggtaggctccaacccggacaagatcggcctgctggacaacttctgcatgggcaacccggaagacccggcggaactcggccgcctggtggaatgcgtgaaggccatcgccagagcggcggacgcgtacaacgcccccttcatctccggcaaggactccttctacaactactttgaaacggaagacggccccatcaacgtgcccgtcaccttcctctgctccggcttcggcgtggtggaaagtccggaccatgttatcggctcctccctgcggcggaacgacagcctgctgtacctcatcggccacacggaagacgagatgggaggctccgttttcgcccgcacccacggcgtggaagacggcaaggtcccccaaacggactgtgcggcaaacatggagctgtacaaggcctattacaacgccctgacttccggcctggtgctctccgcccacgacgtctccgaaggcggcctggccgtcacggcggcggaaatggccttctccggcaagggcggcgtacggctggacctcacgaaggcgccgaccgtcaacggatggaaatccccggcagtccccctgttcagtgaaagcacgggccgcatcctggtggaagtggacccggaattcgccgcggactttgaagcggccatggccggcttcccctgcgcctgcatcggtagcgtcacgaaggaaaagagcctcaccgccacctgctgcggcggggaaaaggtgctggactgcgacgtagccaaactcaagaagctctggaaagacgggctcaccccctattattgatttccaaaaaccgggacctaaccataccaacgattcatttctaccaatatgcctcacgcacttttactgaaataccccggcaccaactgtgacgcggaaacggaacgcgccctgcgcgcggccggcttctccacccagatccagcccatcgccacggccacgccggaacacgtcgccaaatcccagctcgtcgtcctcggcggcggcttcagctacggggactacgtcaccagcggccgcctggcccagctggaaacggaacgcttcctgggagacgccctgcaccggcaccatgccggaggcggcctgctcctgggcatctgcaacggcttccagatactcaccaagctggggattctgccggattccagcctgattgacaacaagaaggaacgttttgaatgcgtctgggccaagctggtgaaggtagctaaaaactcacccttcctccagggccttccggatgaattcgagctgccctccgcccacgcggaaggccgcctggtcacccgccccggagacgcggaaaaatacctggctgccggaaatgtggctctccagtacgtggacaaccgcgacggctgtgaatgcagcatcgcgggcctccaggattccaccggccgcgccatgggcctgatgccccacccggaacgcttcctgctgccccgccaccactatgacaaggactgggccggcaatgaagactggggctggggatacttcctcttcaaatccgcctttgacgccctgaaataacggcaccatcccactcaaccgcccaacctccgcacctccccatgacagacacggcactcatcggttcctcctgcgccctcggcgccttctggtcctcaaaacggtacttcgactacctgattgatgaaaccaatctgtccctgctgcgcggcaaggaattcgggcaggccgtgatcatctgcccctccctccgggaagggcgcagggccatccggcagaacatggccccttttctggcgcaggttaaaaccctgatcgacctcctgcatgaggtgaaggcggaacgggtaacctacgttacctgcattgacacccagccggaaacgggcaatgaacattcccccctgctccgcgaaccggaagatgaatggcttgccgcgctggtggaaatgaaagccttcatcaacctccggttcggacgcgtgctgaacgtctaccttccggaagtcaccggaacgggagcggacatgagcgtggcggatctgctggccgccgccccggaaggaacggaagaactggaagcggccctgctggaacgccaccagctctatcccatgaaccgcctggtcagggatgtggaaaaggcatgggaatgcggaatcttctccgtcaacctggtgccggagcccgtcaccacctttgaactggtggagcagtgcttcccctccctgagcaaccgtcttcccgtcgcgaaggaaacggacccgtacgggagcgccagaacatccgtttactccacgcagtaccatgatccggacaccggctatatcatggacaagcaggacgtcctggaagggctttctccggtcaggcaggcctagcccccgctgaaaaccatttcccggctccgcccgcatcccgtgcaggcggggctttttcatccccctcccggaacgtctccccgccagcagccatgctttcctgttgagcggatacgggaacggtgctatacaaaagccatgaagatcagcgacgacagtcttggatttttaacggaacttctggaaactcccagcccctccggctttgaaatagacgcccagcgaatctgggcggacgagctgcgcaagtacacggaagacgtccagtgcgacacctacggcaacacctgggccaccttccacgcggaagcggaaaacgctcccacgctcatgattgaagcccatgcggatgaaatcggcttcatgatccgccatatcaccaaggacggcttcctttacgtggagcgcgtgggcggcacggatacggccatcgcccgcggacgccgcgtgcgcttcctgggctcccagggggaagtgacgggcgtaaccggaaacacggccatccacctgcgggaacccggggaaaaggaacctaaaatctgggaaatctacgttgacgtaggtgcatcctccgacaaggaggtggcggaactcgggttgcgcgtgggccatgtgggcgtctattgcgacggccccatgctgatgaatgaaagcaagctggtatgccgcgccctggacaaccgcctgagcggtttcgtcttgtcggaaatagcaaggaaactgtgcaagctgaaaaagcccctcgcctggaacgtgatgctcgtcaacgccgtccaggaggaagtgggctgcatcggcgcgggaatgatcacccaccgcctgcgtccggacgcggccatctgcattgacgtgacgcatgccacggactcccccggactggacaagggcaaattcggagacatcaagctgggcggcggtcccgcggtcatccacggcacggccaaccaccccaacctggtggcgcgcctggaaatcgtggctgacaagaacaaaatcccgctccagcacgaagccgccggacgccgcaccggaacggacacggacagcatttacgtttcccgcaacggcgtggcctccgctctggtatccctgcccctgcgctacatgcattccccggtggaaacggccgcccttacggacgtggaaaacacgatcaagctcctgctggaactgatcaaatccctgaagccggaagataccttcggccacaagctgtaagacagtacggcggcaaaggcgcccgggaaaggtgcgccttcttttggcggcagccagggcatgtgcacagggttcgcgccggagaacaagcggagggtgatgcgccggcctgcgggttcctccttcctgcgggcttcaggcttctccatccctccggacgataccctgcctccctgcccctgcaaggaaattttccacgacgaacaccggtctcaagaaacggtgaaaacccgattggacggaaggcggcgttcattggtaaaatgaggctatgaaggccgggaaaccggacaaaccggcaggtcggaaagcgcagcttgaagcccgcagggtgagtaaatctgaaaaatgaacggatcaaaccttcattccgggaaagggagcctgttctccaagcatatatgaatgcggcggcgtgcacgcgaaactgcctccagggagcaagggtcttccggtccctggaaatccttctccccggaatgtattcccagagaaacgttccaggcctgaaaacggccgcacgccctttcccatcggtcacatttcgctgaaatccagccgggtcacattgaaatacgtcttccccttccggcaggaattccacaggatgaccagcatcagcaggaacaggcccagcctccacgccacttcaaagggatagctggtcacttccctttccacgccgatgcaattgcaggaaagggaaagccccctgacccatccctggacgaacagagccacaaacgtgaacgtcagcgcactgcccagcagcgcggcgccggcgcaggtccggcggaagaggagtcccagacccaccacgatctcgcacgccacgcccaggcaggccaggggatgtccccaggcctccgggaaaatggcgaaccggtcaatagtcgcctggagctggtccaggtggaacagcttgcgccccgccacaaagagaaaaaagccccccatccccagccggagcaggagcaggcagaaacggatgatcttttctctcagcatggcggggagtccggttattcaaagtgggtttgctgggcgctcaccttgtcgttgcgcagcttgttaagctcatggcgcaccttttccagctccgtctggagggatttttcccgttcggaagcaggcgcctctgcggaagacggcgcagccgcccccttcttcgccttgcctacggcatcttccgtgaagagcatgttcagcccgggagccttcgtgtcaaacttcaagacgccggaaacgggtttctgagagccgggatgcttcacggaggccctcaccgtcactgttccgggcttggcgcccaggcgcaccagcgccggagcggagccccacttgacgggctgggtcagggtgccgtccggtgaatccgtcagcaattcggcaggaccttccacagaaaagacaagctcttcatcattcaggcgcttcaccgttccacggctgtccgtgacttccgccaccaccgcaaacacgtcggaaccgttggcgcacagctccacgccttcctcacggtccaggctcaggcggattttttccgccctccgggagggccgcacttcatgcctggtcaccaccttgccgccaatcaggccttccgccaccagcttcaccgccccttccttgccggcgcgggcgagcttcttgttttccatgaaatcccaggccttcgggaacacgacgggaacgcgcttgaggccgttggggtaggaagccaccttcttttccaccggcacgcctccgttgacgctcaggcgaacggaatcacagttggaaaacaccgtcacgtcttccggagaaaaaggcgtgcattcgttggctatgtacaccacgggaccggagccgagctcattgcgcgtcttctggggccgctgggacatgaaggcgtaataggaggtcttgggctggcggaaggcatccagaatgccgccgtagaaagggtccggatgatagccgcgctggtggtcgaaggggtgccacaggcaaccgccgaagtggtaggccgaagcggcgttcagggtatcatacgtagtgtacgggaacgaggtcttgaggtaatggagggcctgcaccatcatggggacttcaccccagtggcgcgccgcgcgggaggtggagttatgggcggaccaggtatccacgttatccccagattcacgggtaaaatacggcttgttgtccttccgttccttgatggaccagtgcttgtcccccgtggccgggtgggcgtacagcacctcataatgctgattgccctgggccaccgcgtcgcaagcggtgtaacagcccttatacgggtattcctcatgcaccaggtcgcgggccttcttggcgaaatccgccgggtaatgggtctcgttcaaaatgggctcccacatcatcacggagggatggttcctgtcccggcgcaccatctggcggatgtcgtcataaacccggtccgcaaaaggccccttgccccagaactgccagcccggcgtagcgacgatgacgaaaaggcccaggcggtcgcaggcgtccatgaaggccggatcctgcggataatgggcgctccggattacacgcatgccggccttcctcagcttcacggcgtcctgccattgcaagttgttgggaactgcattccccagccgggcgaaatcctggtgcctgttgccgccaatcagcttttcagggaacagggagccattcagcaccagccccttttccgtaatctccacggtccggacgcccaccctcatggagcggttgtccagcagatgggccggattcttggcattgttccctccggcggcgttccatacctccacgctcagggtgtacaggttgggatcatccggcgaccacggctttacattggagatcaccaggggaatatccacttcacccgtggaatggggcggaatgaccagcggggcggtctctccgacggggtccacgcccttggggtccgtcatcagcgcctgcacgcgcaccttctgttccttgtccgtatcgttggccacctgcaccttcactcccaccctgcctttgcgggtacgggggtcaagggattccgtccggaagaaaactccgccgccggcaacggttccggcctcgttcgggtccgtgatatagacgggaccggtggaaatcaggtaaacgtcacggtaaatgcctccgaagtaggcgaaatccaggctttcctggggcttgccgggaggataggacccatcgttggaattgtccgccttcacgacgatcacgttcttctggcccggcttcagccacttgtccagattcacgatgacgggaagataacccccgaaatgctccgcggccttctccccgttcacccaaacctcgctcttccccatgatgccttcaaaatacagggtgttcctcctgcctttcagcttctccggggccgtgaacgtcttccggtaccacaccggcccctggtaattggagcagccgctggcctcctccggaagaagctcaatgccgttgggaagattcacggattcccaggaagaatcattaaagtccggactgttcactccttccggggcatttttgcccttgaacagcttccagcccacgttcatgccgtagacatccctcttggtcgtattttcaggcaggcggagggctcccgctacggaataggctcccgtggatgacgcagcttcttccctgtccgcagccgggtccgcataaagagagaaagaaccagccaggcatgccgccgccgtcaggatagtagtgactttcataaatggaataggtgaatgtaatttggatatacggggaaacactgccgccatctttcattcatatagtacatccttgctgataatgcaaatacatatgtcatcccgcatcttccgcttgacctggaaggcatgttttttcatagtcgattcgtcctgtacgggattatcccgcagccccggtccgggtgccaggctttcagtcccgtgaaaaggaaaaagtgtggcgttcctccccccggctgtttcagggctacgcctttatccactagttttttatgtcatctttctttcagaaaattgtcaaacttttctcctatgacattggcattgacctgggcaccgccaacacgctggtcaacgtcaaggaccagggcatcgttctgcgagagccctcggttgtcgccgtcaagggagacaaggttctggccgtgggggacgaagccaagcgaatgctgggccgcacccccggctccgtcacggccatccggccgctgaaggacggcgtcatcgccgacttctacatcacggaggaaatgctccgttacttcattaaaaaagccacggccaggtattacctgatcaagccgcgcgtgctcatcgccattccctccggcattacggaagtggaacgcagggccgtcaaggaatccgcggaagcggcgggagctcgccgcgtgcacctgattgaggagccgatggccgccgccatcggcgtgggccttccagtccaggaagccgccggcaacatgatcgtggacatcggcgggggcactacggaagtggcacttatttccctctccggcatcgtttacagccgttccgtccgctgcgccggggacgagctggacgacgccattatctcctacatgaggagaacctacaatcttatggtcggggaacgcaccgccgaggacattaaaatccgcatcggctccgcctatcccctgccccaggaactctctatcgaggtcaagggccgcgacctggtcgcgggcctgcccaagacagtgacaatccgatcagaagaagtgcgcgaagcgctcacggaacaactcaacacaattgttgacgccgtgcggacgactttggaacgctgcccccccgaactggccgccgacctcgtggaccgggggatcgttctagccggcggaggcgccctgctgcgcggactggaccagctccttcatgagcagaccggcctgcccatccacattgcggaagacccgctcagcgccgttgcggaaggtaccggaaaagcccttcaggaactggacttcttcactaatgttactgacgcggaagactgaagacggaacctccggagccagcgctccggccttgcgcctgccgtactgccgcatcacatcaacgcatctgcctgcatgattcctctccggccatctccacagcttgaaatccagccgctcctgccgggaggcggccctccgggaacattgcgggcaatagcacaccctagcttattcacaccccgtgtttacaaaaatgcttaaaaaaattaaacgagccttcggcttcggatcctgtgatcccatggaaggctccaccatcatcatcaatgccgagaaactcgaacgccgcgtagcccttctggaaaacggcgtactggaagaatacaccatcgagcgcgaaggcgaagacaacatcgtaggcggcatcttcaagggccgcgtcaaaaacatcgaaccgggcctcaaggccatgttcgtggacatcggccaggaaaagaacgccttcctccacttctgggacgctctgcccgccgcgctggactccagcctggaagaaatcgaacgcgaaggacggccaaagaagcagcagcgcaaaatcacgtccaaggacattccggacatctaccccatcggctccgaaatcatggtgcaggtcaccaagggcccgatcggcaccaagggcccccgcgtcaccacaaacgtctccctggcgggacgctacctggtcctgatgcccttcacggaccagttcggcatctcccgcaagattgaagaccccaaggaacgcctgcgcctgcgccagatcatgcagaagctgaacgtgccggacggcatgggcatcatcatgcgcacggtggcccagggacagcgctaccgccactttgtccgcgacctcgccatgctgctggagcaatggtacggcgtggaggaaaaaaaggaggccaaccccgcccccgtctgcgtgtaccgggaacccgacctgatcgaacgcacggcacgggacttcctgacggacaccgtggacaacatcatctgcgacgacgcggaaactacggagcacatgcgctccattgcgggaaaaatctcccgtcgcgccaagcgccacatccagcacttccccgtgcgcacgcccatctttgaagaactggggattgaaaaacaaatcaacgaagccttccagcgccaggtgctcctgccctgcggcggctacctggtgattgacgagacggaagccctgatcgccattgacgtgaacaccgggcgcaacaagggcaccaaggacctggacaagaccattctggacaccaacctggaagccgcctatgaaatcgccagacagctccgcctgcgcaacatcggcggcctggtggtggtggacttcatcgacatgcgccataggaaggaccagcaggccgtgtacaaagccatgaaggaccgcctgaagcgcgacaaggccaagacccaggtactgcagatcacccccatcggcctgatggaaatgacccgccagcggctcaatgaaagcctccgggaatccgttcatgacccgtgcccgtactgcggaggccggggccgcgtcaaatccgtgatgaccatgagcgtggaaattcagcggcagatctacgcctgcatccagaaatacagggaaaccatcggggacatggtcatcgtcgtaaactcggaggtgctctcccgcttcaagaatgaagacgccagcctgctcatggaactggaacgccagcacagcggaaggttgatcttccgcggcgaccacaaccagcaccgcgaatccttcgccatttacgacgcccggtacgacaacaagccgctgtaccaatccgggcagtagctaaaccaactccggctttccgggccgggcgacaccatcgcccggcctttttttgacccgtcatgaacagcattccctcctctccgaacgatcccgtcaacacggacatcctgatggtggcggaagaccgcgtcaagggcttccggcgcttccccttccatgccatttccgagcaatgcggccacccggtcccggtagtcatccagcgcctgaaagccatgatggaagccggagtggtgcgccgcgtgcgccagacgctgctggctaccaagctcgcccagggggccctggtggcatggtccctgccggagaagaacctggatgcggcctttgactggatgaaggagcacgaccccttcacgggccacgtggtgctccgcaacacggatgcggccaatcccggcgcccaatacaggctctggaccacggtcaaggtgcccgtgggctgcggcacgctggaggaacactgcgagatactgaaacgccacatcggcgcggacgactatgtcctgctgcccgcccgcggcgtttttgcgctgggcgtggggcacatgcgccgcaggggcctccggcccggggacaagactccggaaccggcccccatgcaggaaacgaaaaccgtctccctctccgggctggaatggaaggtgctcctctccgtcaaggaacagctcaggccggaggaaatggtggaagacccctgggccctccgcgccgcccaggctggcctggaaccggaggaatactgccgcacggcggaagagctggaccggaagcaggtcatcggccgcttcgccacctttttggaacatgtacggaccagaacgaacgacggccccgtcaccaaatacaacggactgttccactggacggttcccgccggcatggaaatccgggcgggagcggaatgcggacgccacatctgcatgacccactgctattggagaaccggaggggacatcttcggcggggcgcagatcatgggcgtggtgcacggcctggaaaaaaacgccgtgctggaacacaaggcggcgattgaccgccatctggacgcctcaggcattcccgtcctgcatacggccgtcttctggggcgaacgctcggaaatcaagccctccgaaatttccccggacctgtacaggaaatggacggaggaagtgaaaagcgcccccgtcctgcggtaggcgtccttcttcctttcctccctgcttcgcgccattccccgtggcaaacttgttgcacgaacaggtttccctcccgcgcgtccgttctggcatggtggcgtcgctcccgttaacctgcggagcttgtcaccatgaaggcacaccatctttattccacagccacgaccctggccacggcggttctgcttgccgcgccctcccttgcggaccagaccatcagcgacacccagaccaaggccgtcaacatgacggagggcaaactgaccgtcacgggaaccggattcctgaacgtcgccaaaaatgccgtcaacctgaaagaccccatccagtccgcccttgagatcgcggtaatggaaggaggcaggatttccggaaaaagcgcccttgtcctggaccagggcatggaaaacggaataacgggacagttgatcagcgtgaccaattccggcacgatgaccggaacggaaaaacaggccatcgacctgcgctacatgatcaacacgtccgccaccatcaccaacaacggtaccatttccgccggtcagaaaggagccgtcaaactgggcaataacgccactgtgaccaacaatggcacgattgaaaccacggctgcgggggaaaacggcatcacggccaagcattacgatccggaagacgacggcattgacacctttgcccatggcctggatcttgccaacaacagcggagggaaaatcaccggcatgaaacacggagttaccggagaagggaaagccgccatcagcaataacggcaggattgaaggcaggggaggttccggcctgaactgggactggaacgccgccctccagcaggacgacaagtacgtggtcaccgtggttaacggcaaagacggcgtcatcagcggcaccggagacgcaaccaccctggacggcgacggcgtggacgtggattacatcgtaaacctgaccaattccggcacgattattgccaaggactccttcggcagtgcggacggccttgccatcggcgggggcgtcgtaaccaataccgggaccatcacggcttccaattccaacacgaacggccaggcctacggcattctggtggatgattccgacggcggcaatgcctttgaagccatccggatcaccaacagcggcaccattgagggaacaggcgccaacggcgtgggcatcaggattgtcagcgacagggagaactgcatcttcatggaaggaggaaccattacaggaggcagcggccaggcggtggtcatgggttccggcgacgatgtattttcctattccggcggaacagtgaacggcagcgtggacggaggaacaggcttcaacaccatggtcttccaaccggcggagacggacctcacgttttcaagcgatttgaaaaacttccattccatcagcatccagggctcatccctttccccgggcgcttccgtcaccctggaaaacctgaccattaccctggatatggcctccctgagccaggacaagcccctgttcagcctggaggggaattccacagcctccggctctcttttattcaacaatgtaatccttcaattgatgggaactccggacgctcttccggtggatgggtccggcatggtttacttcaaactggcagggaacggcatcagcctggaagggctggaagtacggacggaaggagggtataagctggatatgagccgggatggctacgtaggcgtcaatttcaacacgccggaaccggctgccgctgccctgggcctgttcggcttttccctctccatgctgcggcgccggcgcactgcggcctgacatcattcttccggaccccccaaatcctccaacagggaatgaccctgcacgggaaaaataaagcttctgaaaagacgagcttttttcccggacgcaggggcgttccgtacatgggggcagaaaaccaacaaaaggataccttctaacggaggacagcgccgcgcaacggccttcctgccccctgttccctctccggcgttgagtggccggctggccgtccatgcggaattcttcattcccggctttcagcttgagggggaggcaaaccccaaacagtcatggaagccgcaacagccgcaccggtttccctgttccggccccctatcatcaacaacgccgtttctccttccccgcgccagggcaaaacatacggaatatggctttccaggcatctccgcacaaagtcccggaaactgcatcatctgcaaaaaactgtcttttcttccttgtggaacacgcgcccgcagccgccacctcatatttttccgcaagtctgcgctcaagagagcccctccctacggtacgcaccgttttttaaccgctcttgttctctccctgccagcggctcttccgcattttcccaatgaaaaaatgtctccggaaaacgtgcagcgtcccctaaggcgcggcagccattccggacagtagggatgcggtaccctcatgagggaacgaagtacaaaaaaggactgtctccctgtgaaggggagacagtccttgttgaatggaaggcggctggcagaaaacccgccgcgtcagttcgttactactttttctccggctgggcgggagcctgtgccggggcttgggcaggcgcctgagcgggagtctgggccggagcaacggcagcgggatgcttgtaggaaaccgcaaacccatcgtacttggccggcagcttcctgtccggaagcatcagttcatgcaggcggtacagcgcggccgcttccttgacgtgcgcgggacgggccttcatctgcaagtcgggaatcacggtttcaggattgtgttttctggcttccacggcagccgtcacggcggaatcctccaggaacttggccacatccggcatgtgcaggtaggagtctagggaacgcaccacgcaggcggaggccagttcttcatcggaaccgtgcagcagcaccagggcttccgcaaagtaatccagagccttgttccaatcctgggccaccatggcggcggccccaagagcatacttcatccgcgcctgctgaaggcgggtggcatttttcttggtggccaggaaagaggcggcacggcttttcacgccgttccagtccttgtccggaatcagggccatgattttggcaacctccagatcatcctgggcggagggggacagattggaaccccttacggggaacttggccagcaggcctttgaccccggcccagtccatcatgcgcatggcgcactccaattcataaacggccgcccgggcggacaggctgtccttgatggaaagcgtggaggcatatttgttcaccagggcatggaatttgttgcgggcgtcctggtatttccggttttccatagccaccttggcgtccacgaaatcatccgtttcaaagatgtacagcgttttgaaggcgctggccatctgctggaggacttcctgggattcccggctttccacgaactggaccatggggccgttggcggaaagaatgtaaatatccgtcgggcggccattcttgatggccggagcggcagccctggcgcgcaggcgctggggattctgggcattctgagccatagccggaaccagggtggacaagccggccaataccattattactgaaagtgctttcatattgttgattgctaaaccttttgttgttacttctggcccttggcggcgcgtatggcggcttcataggcggcgatgtccgcccgttcctggctgacggcgggatcggagccgaacttggccgtcttatccttcacctcgttgaccagggcactgtcttctgccgtcatcttcttgcggttggcgggagtatccagcagttgcacatactggctgccggccttccaggcgatatacctgtcggacggctgcttgcccgccccctgggacatcgtgttcctcttccacagcgtatccatctgtgcaagcacggcgggagcggaccacttcacgaggcccttgtacgtgcccgtgatgttcatgaagttgatcagggccttgtccagctcgttctgcttcaggtaggcttcaccttgcaggtagaggacttccggcagattcttcttgtaggacttgttctcgcggtacttgtcggcggcggcaatgacggacggccagtcctggcgggcggaggtgaacttgaccaggttgtactgggcgtcttccatggccttgcggtccgggttggcgctggattcctccttgctgagttcatccttcatcatcttgatggcggtttccaccttggcgttatctttgctgcggcccagagcaacggccttcccgaagaccgcattcttgcggtacttggacatgccgttgatgcgggccttcttgcgcaccggatcaggttccgacgggtccaggatttcatcaaagtaggcgatgctttcttccggctgggacgtattggccaggtggacacccagcttcacgagcgtgtacggaggcaggtcggaaggtttgaagtcccgcttcagctccacgaagagctgcttgaccagaccttccagagcggccttctcggcacgctgttcgtccgtttccgtgggagccttttcataccgttcctgcgtctgggcaatgacggccatgcggagcatggcgctcagcgtcttgtccttgtcattgtccacgccggggaaccggtagaagtggttgcgcatggcgttggcgtccagattgcggcccagcgcctgattgccggccatgtacgtcttggtgtaggagttgacggcttcctccagaagaacggtcatcttgggatcgtccttcttgccttccctcacaatgacttcctgcatcttgacggacgcggggtcaaacatctccttgtcgtccttgaagaagtccatggctgcggcagccagctggaggctgtagcggctgccgggctggtcgctgttcttccagtactcgtcataccacttcttgacttcgtcccgtcgcgccgtcctggccgcttccacggcttccttcggttctacggggagaggtttcttggtggcattgatgagcaggttgtacacggcttccgcggcggggcgcttgtcgcccagctttttggcggattccagagcggccaggaaatagccttccgcttcctgttcatgctccttgctgccggcatacaggttcgccagcaggttgttggcatacgggaacaggcggtgctccttgaagttgtccacgatttccttcgcatccttcgtggcaagctcctcgtctccggggttcttgcggttcaggtagttgaaggcacggtcataaagcacggcggccatattggcgtcattcttgtccgggaaacgggcaatgtaattggtgaaggcctggatggcttcatccgtattgcccaggttcgtgtaggtttcacccagcaggtacatggccgttttcaggtaggtgctgtcacggtattccttcacgaagcgttccagcaccggcaccgcttccttgtagcgggcggcgtccgcagcccccaggttgaacagggaggcgcctttgcagtacagggccaattcatagaacttgtgggtggggtcgtccttgtgcagctccatgaccttgtccgcctgctggacgcagagatcgaatttcttgtccttcagcagtccttccagggacagggtgttcagcatgggggcatacttggaattcgggaattccttcaggtgctgcgccacaagctcgccgcccttgtccgcttctcccaactgccaggtagtcatggccaggtaatagaggttgtcctccctgcccggggcgtccggataggattcattgataagctggtaagcggcgcgggcgacccgctgggaaccatgcaccagggcctggttgcccatgaaactgaacgtgaaggcgtccatgaccttcccttcctccttcatcttgttgaactggtcaatcagggcggtcaccttcgtcctgtccagcgtatgggagaggtccgtcacgccgggcacggcgccgttggcgcgtcccaggcggtccagggaatggttggcgtccgccagcactccggcctggtcgggcaggaggcccatcagcaccattgccagggaggcgtagtcttcagactccttctgctttccttcctggagaagggcgcgggatttttccagcacttccgcaatgtagctcaccagccggggagcgtacagcgccacgcgggtggggctgatgttcatcacggaaggatgggcttccacaaattttaccgtttcctggcatttgccggtcttgatggcggcatccaccatcgccaggaagccgttggtgatgacggcatccgtaatgcggcgccccttgtagcgggaggtgacgcaggaggtaaggttttccagccctttctcaaaggcgggcggatccatcttgaaataacactgggccagcagtccctgcacttcaccggcattaacattccgggctacagggtcgctgcggtattccttcaggaatttctccagcagctccgcgcccttggcaaaatccccaaggcggcaatagttttccccctcgcggaacagggccattttcacgagctggttcttggcgctcgggaacttggtgtaacacgccttgaacgcttccacagcttccttgtattgcttcaattgggccaggcagacgcccttctggtaatagaaccagccgaagccgtcatccagccccagcgtcttgatacggggttcataaacgcggatgcagcggtccacggcatccagggcttcctgccacttgccttccttcatggcggtcagggccgtgcgctggtaatcgcgcgggccatgctgggcactggacgggagcgccgccccaatgctcaccacggaaaccaggcctgcagccagtgcagtagtatagtttgatttgatcatgtgtttaaaattcgttgaaacagaagagataatagaataggtacaatatctgtgcaaatgcacggaatgcacctatctgtaatggattgcgtcattctaacaggatgctgcaaactctaaagcagaaagttctgtatttttagtcatccttgcaagaaagttcttcctgctcgcgttcccttaagggaggattgggtttggaaccaaaaaggcctttttatctctgagaatcctgctctttcaaaaaaagatccggcattccgagccggagcaaattccggccattaacgaaatgaacgcccctctctcaactatccttgaaagttttcaggaccactgagtccatcccggctctcatcaaaacatccatgacagctgcggcgcgctgattgggaacatctccagccaccattaactgaaccactaccctgcctcccgccctccccgcgctccgctttttgtttttcagccactcgacgataacccccaggctccctttctcctccaccagaggataaaaaaggccattcccgttaccgtaaaagagagcatgcggaagaagaaaaatggaagcggacggcattgatgaaaccgtcccgctctgcggcctttcaggaatgcctggaactgctgcaacaggaggtccggaaaaacgaaccctcttcacattgcattctgcggcaacctgtataacttcgcgggaatccgtgaagagagccctccggtcaccgcgcagatagaggaaaggctccttacagccctttgccctcagctgttctgcctgcttcttgatatgtttctttagttcttccggggaatggagaggctcatgggagccggatccccagcggatactggaatcaataccttccggacgcctgtcctcctttttgccatacacattaatcacgatgttgccgaaggaggacctgatttctccggaatgttcatcttcctgcatctgaaggccttcctctccccgccgcgcactacatcctgccgtctcggaaaccgggatgctgcggcaggcgcccgattcctgagacgccttcaacggtaatgcctgaacggcgttcgagaagacgatcaggattgccccccaccgggctacatgatttgaccggaccataagaaaaaaagacagcgggccacttccacactcttgcagggaagccgaacatcaataacacggtccatccgtgaatggcttagtcgtccttgaggtcggtcagggccaccgtggtaattcctgcttctgtcaaagcgttcatgacgtcaatgacgcgctggtggggaacatcgccctccacccacaactgaactaccggcttggtgcctacggcgctggcttcctgtttcttggcttccagctgctgcacgagggtcgccaggttatggttgttcatgtcattgtcaatcatcaggctgttgtccttgccccagtaaatggtgccgtccttgatgatgcggatcagcgccggttcaatctgggaggcggtatcgctcacggattgccccggcatggacatgtccagcttgcgttcctgaatcagggaggtcgccacaatgaagtaaatcaacagaaggaagcacacgtcgatgagggaggaaatatccagcttgggatcttcatcctcaaccatctccaattttttatgtcttgccatagcgcgtaatgttattcggccttgtttgcagcagaggaatttttagcaggcaatacggcaaagatcaccttgaccacgccacattccgcagccacgcgaatcacttcccgggagcccttgaacagggccttctggtcgccgcgcagatacaggcgggtttcaaagtcctgcttgtccttgaagcgttccgcaaggtttttgatatattccttcagttcatccggagagttgagcggcgcactgacatcggaagcccagcgaacgttggggtccatgccggcgggacgctttccatccccttcaccgtacacattcaccacgatacagccgttggcggatttcacttcaccggaactgctggccgtgggcatttgaatgttcttatcctttttaacggtaatggccgtagcgttcaccacgaagaagatcaacaggaggaaaaccatgtcgatcatgggggacatatccatttccccgctctcttcgtcggccgctacattggcttttttcttacccataagctacatttggttgagattctccggcccggctccgcctgggcggaaacttccggaccggaccgtctttcccggcgatcaggccaggccttcgggaatgcgggcaagctgggcttcggcgttcaccacgttgatggaggtgttcaccatttcctgcacggtgcctacgcattcggcaatatgggcgttggcgatgcccttctggaagaagaagaacggcgtggcgataatggcgttgatcaagccccagaaggtcgtcagaagagccacggagatgtcaccggcaagctgggtggggtctgcctgtccggcgcttgacagcgtgccgaacgcgcccaccatcccctgcaccgtaccgaagaggccgagcatgggggaaatctgcgcgcaaagggccagcatgttaatccatttgaatacggaacggctttcattggccgtaaagtcggctacggcgtcttcaatggcgtccttgccaaggtcttccggacgggtggcgtccacattcggcagggcatacgcaaccaggcggcccagataggtggggctgccggctgccacttcaatggcagagcggatgcggcattcggccatcagctgcagcagggtgaccttgaggtcttccggacagaatttttcctttttcagagccaccatgttgtagattaccaggaaaacgatgaaggcttccaccagcataatcgggatcatggtccaaccaccggcgatgatccatttgtcaagcatggtctgttcctgcggaacagcggcttcggcagcttcctgagcaaaggcggatgtagaaaacgcggccatcaggacggaagcaaatgcggcgaaacggaaacccagtctaaaaaggttcttcataatttaagttatatggttgttcgaaaagatactggtgtattaaagcatgcaaattcagacttgcaagcattcatttcgggccctggcaaaaattcagacacccgcggaaccgtcttcccgggccagccggctgcagatcggacagcgccctccgcaaccccgcgcagagcagtattcacgcccgtacaagacgatgcgcaaatgaagatctccccatgaattttcagggaaaaggcttttcaagtcacgttccacggcttccaccgttttccccttgctcagcccccacagccgggaaaggcggaaaatgtgcgtatccaccggaaaggcaggaacgccgaaggcctgagtcatgacgacggaggccgttttatgccctaccccaggaagggattccagggccgcaaagtcgcagggaacctgcccctggtatttttccaccaggatgcggctgaggttcacgatggcggacgccttcctttccgagaggccgcagggccgcacgatttcccggaccgcttccacatcctgccgggccatttcctccggggtggaagccagggcgaacagggccggggtcaccaggtttacgcgcttgtccgtgcactgggcggacagaagaaccgccaccagcagggtgtaggcgtcgcggtgcgccagggggatgggagggttcccatacagggacatgagttcctcccggacaatggaagcccgttttttcgtatccatgccgccagattaccatcctgcacgcacgccggaaaataaaaaagcgccgccatgtgatgaatggcggcgcccgggttaaagggttcaggaatccggtcagtcagccttggcgtaaagccccttggacacgcggtgctgcagggccgcatacatggcgcggcagtgcctatagccgcggcggctgccgagcacttccagactgttggcggggtctccccagcggacgatggtcagttccacatagcggcggccccattccttcatcagcttcttgttaggctggtaaatgtcaatggttccggtgccgaccagggcgctcccgtaatcgtcaacgacgtagagatagggctgccccttgatgcggaaggttgttcccagagggtaaacggaccagtccgcagcggcgctgcgcacggaagaagtgtatttcagcgtcgtgccaacggcattccggggtccgtaggccagatggtcacgttcggaatgggtataagccgtggtgcgtactacacgggtgcgctgggcggggtggtaaaacggcatcttgtgtttgtcgcgccccagtttggggagcttggaagaaggcactgccgaacggctcggcgccaggggctgaacaaatccctgggcattttcacctacacgggccaaaacaagggcgtcactactggatttccccatgccggttacagctccgtttgtcgagcaactgctgacaaacatggccgcgacggcacaagacagggtggcaattattcttaaattcatgcggtatgaggttaggcgccatacacatggcagtcactccggcagaaccttcaggccatgtgcggaagccgaaaaatcggcaacggcggctcttgggtacgaaataatttctgccttggcaatccttttttttcaccgacccccttccaaacaaggaaaacctattaatataaaacgctaaaaataagcaatatataaaacatgccgcatttttgtcatatcatgacaaataatatacttcacgaaacatctttttctatcacatcacgacacacttttttatttttaatacatcttgcttactataaatatgatataagagaaaatcgacctcaatccttcaaaagattccctaaaaaagttcaatgggccaaattccggaaggccgtcatggatggaaaaatcgcgtctccccttgaacgaatttccctttgctgttcaggcttccacgtgaatttttcctttcccgtttccttatctgcgcccttcctgcttcccaatatgccgcaatgcagggttcgggaagaggttgggaagaacatttcccggcaataaggattcgggacacgggatttttaccggggcatgctccggccatgggaaagctatagaaaaaaaggcatgcaggcctgattgaaaaaacatcccgtaacccgtcttgcagcagtttttcaaattctggagaaacttccatgccaagaaaaagaaagatgcggggaacagcccgctctgcgcaggaaaggaatccttccgttttctcctgtaatttttccggagcgggaaccggaaaagcccggttggacggaaaacgaagcttcaaccctgaagagcagggaaagccggaaggcgaacgaatcaattccctgcctcctgtaaaacggtcccggaacaagcatgcccgcttgcaggcgggcattgccccgttgaacggcattcatggacaagaggggggaaatttcatagccgcccttccttttttctctttcccctctttcctgcgacgctcttcagatgacgccaagcctcctgctcccggcggccgggcgcacacccaatgggcagttgcatccctccggaaatagattacactccggaacgaacatgtctgccggcctgccccaacacctcacgctggactacctgcgcgccctgttatcccggggcgtggagaaggctgccgtcacggaggaggccagaacggtcttgaggaaatgggtcatggacgcacggcggatcgccaggggggaaatcccctcttccgtttccgccccctctgtttccggagaaacgcagccgccgccggaaattccaggccagccgccggactccgtggatgaagtttccttcggcaacgaactccgggacatcctcaacggagtacagccgggcagaacggaggaggaagccacgctgccccgccatatttcctttgccctggaaggtgaaacggaggaagagaaactgtcctccctccgggaactggtcgtcaactggccgccgcttcggaatatggagtccctgcgggacacgcccgtcttttcctccggcagtcccagggcggacatcatgatggtcacggacgcccccggcctgtatgaagaaaagcagggcgttcccctggccggcccctccggacagaagctggacgccatgctgaaagccatggggctttcccgtacggacatttacctgacccatctggtcaagtaccgccccgccctcccccgccagcttaccaacaaccggcctcccacggaccgggagatagaggtatccctccccattctccgggaggaaatcatgctggtgcgcccgaaagtggtggtagccctgggcgccatcgcggccaggggcatcctccaatccggagagacgccgctttccgccctgagggggacgttccacacggctttcgacacgcctgtgcgcgttacttacaatcccagctacctcctccgcacggaggatatttcagaaaaacgaaaggtttgggaggacatgctgtgcgtcatggaacaggccggccttcccatttccgaaaagcaacgttcctatttcctgcccaaaaagtaacatatggattatttaaacagcattctggagcgcaaacgcgccgacttgaaaaaaatccttcccctggaagggaaattgcgggcctccgccatccagaggaatgactatgcgggattccgcaccgcggtggaccttggggaaaaccgtctttccgtcgtcccggaaatgtccagggtccatcccgtcctcaacctccgggagtcaaaccaggacctccgccacctgtacggcatgttcatccagggcggcgcgcagggcatttccatcgccgtggaaccggaggtatacggcggttcctgggacatggtttccaccatttccagaatcagcactgtccccgtcatggcgcgcgacgttttcatccatcccgccatgatctgccaggccatcgtctcgggagcggacgccgtcaacctggtggcggccgccctgccggaaaaggacctggaagacctgtaccgcatggcctccgggctgggactggacgtgatgatggaagtccataccctgaatgagcttgaaaccgccatggatctggaagcggaattcgtctgcatcaacaatgcggatccgcataccctccaggccaatccggcggttacggaaaaactcattgaagaaattcccgcctccgtcaccgtcctggccgcaggaggcatccgcaccgtggaagacgcgcgccgcatgctggacgccggagccaacggcgtcattcttcaggacgaactggcccgcatggatattccccaagatttcatggaagccattctggcgctcagggcggaatgatttttcctcctgcactatatataatagacaggagcaatctgtgcccgcatggagaaatgcgggcttgaagccgcttccgcggtttttccaatcatggctgtcccggaacggaaagggtcccggaattgtctcactttccgtatggacatgaccaacagcccgcatgcccggcatggagcttccggacacacggaccccgtctgcggagcgcaagtcggggaagatactccctggaaggccggctatcaggggaaaacctattttttctgcagccgttcctgccgggataaatccacggcagcgccggaagaagctcttgcccaccctccggacgccggacacggcatggacatgaagggcatggacatgcccatgcaccaccatgaagacatggaccattcctctgccatggagtctgcggccgccgctcccggtacggtgtacacctgtcccatgcaccctcaaatccggcaggatcatcccggagcatgccccatctgcggcatgacgcttgaaccactgctcccttccgcaaacgcccgggacgatacggagctgaatgacttccgcaggcgtttttatttttccctgcctttcgtcgtcctgatcttcattatttccatgggcggccatcttgcgcgctggatgaacgccggagtccagaactgggtggaactgttcctggccatccccgtggtcctgtgggcgggagagccgctcctggtccggggatgggattccatcaagacccgcaatcccaacatgtggacgctgatcggcgccggaacctccatcgcctttctgtacagcctggccgctaccatcgtgcccggctggtttcccgccgtttttacccatgacgggcatgttcccgtttattatgaggcggcggccatcatcatttccctcagccttctgggccaggtgctggaactgaaagccagatcccgtacggcggaagccatcagggccctgatgaatctggcccccgccaccgcccatctggtactccccaacggggtggaaagcgacattcccctgaaggacgtgcagaccggcgacgtgctgagagtgaaaccgggagaaaagattccggtagacggcgtcctgaaggatgggggaagcgatgtagacgagtccatgctgaccggagaacccattcccgtctcccacgttcccggcgacaagctgatcggcgccacgctgaacaccacaggcaccttcaccatgacggcgcagaacgtggggaatgacaccgtcctggcgcgtatcgtcaacctggtggcccaggcccagcggaccaaggcccccatgcagaggctggcggacaaggtggcgcgctactttgtgcttgcggtggtgctcattgccgttctcacgtttttcgcctggggattctgggggccgcagccatcctggccgcacgggctggtgaacgccgtcgccgtcctgatcgtagcctgcccctgcgcgcttggcctagctactcccatgtccatgatggtggcttccggaaaggcggcctccctgggcatccttttccgggacgcggccgctctggaaaccatgcacaaggtcaatatcctggtgatggacaagacaggcaccctcacggaaggcaggccatccctggtcaacgtaaccacggggaacaacgtgaatatggacgcgctgctcgcccggtgcgcctctctggagcagaacagcgaacaccccatcgcgcacgccttcctccagaaggcggcggaggaaaagctcaccctgtcgcccattgaggatttccagtccttcccgggcggcggcgtggccgggactttccagggcagcaaggtttgcgtaggcaccgcagacatgatgcagaagcggggcgtagacatctcctccctggctccgtgggtggaagaacagcggagacagggccgcgttactgtctttgccgcggtggacggccaggcggcgggagccttctccctggcggataaaatccgggaaaacacgcgccaggccctggcggaccttactgcgcgcggcatccgcatcatcattgcctccggggacgcgcccgcgacggtggaagccgtggcgagggagctgggcatttccgaattccacggaggaatgacaccggcggacaagcaggcgctcatcgcctccctgaaaagcgggaacgccgtggtcgccatggcgggggacggcgttaacgacgctcccgcactggcggaagcggatgtgggcatcgccatgggaacgggatcggacgtagccatgcagagctgcggcgtcacgctggtgaaggggaacctgctggtgatttccaaggctttcgccctttccaccgccaccgtgaaaaacatgaaatccaacctgggtttcgccttcgtgtacaacgctctgggaatccccatagccgccggcatcctctatcccttctggggcatcctgctttctcccgtcattgcggcaggggccatgtgcctgagctccgtatccgtcattctgaacgccctgcgcctgcggcgcttttcatgaagcgggcaaatccttctccctgaacgctccgcgtatatgcctgaattccgggggcttcccctcccggtacaggacttccacaatatcgtaacgggagggaaccggttccggaagctggcggagccattccgccgctccccgccgtatcagcgcccttttgcgggcgtccacggcgcggcgggctcccccgtaactgtttcccgtacgggttttcacttccacaaaaaccaggcagttcccgtcccggcacacgaggtccagttccccgcccctgacgggacgccaattcctccttaaaacggaaaacccttccccacgcaggaaagaggccgctgccagttccccgtacattcccagccatgccgtatcccgctccttcctattcaggaatggacagttccatttgtgaaaccggcgcaaacgagcggcgatgaagcggacagggcccatgcctccgcagggcttccatgtgggctttcgtgccatatcccttgtgttttgcaaaaccgtactgcggataggaggcatccgcctccgtcatcatgcggtccctcgtcaccttggccagcacgctggcggcggcaatggaaaggctcctgccgtctcccttcacgatagcgcggtgcggaacgggaagccccttgacgggcaagccgtccaccaggcagaaatccgcatgcggggccagtccttccacggcgcgcgccatggccagatgagtggctctcaggatgttgagacggtctatttcctccacggaagccattcccacggagcaggccacctgttcgcaatccagcagagccaggaataggcgttccctcttagccgcggtcaattgcttggaatcattcaacccggacagttcctccggcagttcaggcagaatgacggccccggccaccacggggccggccaaagggccgcggccggcttcatccaccccggccacataaagaaaaccggaggaacgggcctccctttcaaaactcatatccgggtgtgacttttccgtcatggcctcattcctcctcctgttcttccggaaggcgggtcagcagaatctgcgtgattcttctgccgtccgaccccgtcactacggcccggtagcggccaatcttcaattcctccccttcttccggaatgtaacccagccggctgatcacgtaaccgcccagggtggtgacgcccgggcaatccaggtccatttcaggcaggtaatccgccaagtcaaacagggtaacggctccgttcacggcatacgtatccttgccggtcttgacgaattcccgcatttcctcctggtcaaactcatcctgaatgtcgtcccccacgatctgttccagcacatcgtccaggaacaccaggccgatggaatcaccaaactcatccaccaccagggcaaaatgggcatgctctttcaggaagaacgtcagaaggctgtccagaggcatcgtatccggcaccacgcgcaactcacgccgcacgcttctaaggtccggattttcctgccctaccagcttgagcagatccttgacgtgcacccagcccttcacctcgtccagatggtcgccctccaccagggggaaacgggtatggcgggacttccgggcaagttcccagttctcctcaaagggagccgtcaaatccatcacgtccacttcggaacgcggcgtcatcacgtccttgacgcacatgtcgttcagttcaagggcattcttggagatctccgcctcctgcttcgtcagctctcgggaacgttcgctttcctccaccaggtacatcagttcatccgtgctgtgaaccgtgcaggccgtggagcggggatcgatacccagcaggtacttcagcacaaaccgggcaattccgtccgtcaggccaagaatgcccgtatatttgaacaccgtgtaaaagaaatgcagcagggggaccgtcgccagagcggccctgtccggatggcgcaccgccatggccttgggaataaactccccaaaaataacctggcagcaggcaaagaaaataaacgtaacggccagggcaatgccgtaaacgggaaccttaccgcccagccccagggaaacaaggaagggagccgtcagctccgccacgaaaaacgtgcccaaaaatcccagcgccagagaagaaagggtaatgcccgcctggcaggcggccaaatacaggtcaaggtgcttgaccgccttccgtgcccgggccagcttcctacgggtacgcgccggaacgccatccccggcgtgcagctggctttcgcgaaccttcatcagggcgaactcggccgccacaaaaaacgcgttcagcagtaaaaaaaggataaagccggcaatcgccagcgtcattccacccagcgccggaacagcgccgggcgcttcagcggccccgaaggccgcaagaatactcagagggtccggatcattcattctgtttcaagtagtatacgggaaaggaggccggaatatttcccggcttttgtgttacagtttttcataaacgcccttgtcccggcgctccagcacggtgaacccggctgccttggcgtcggaaacggaaaggggcttggtcacctccggcacattgatccggctgatgaccttgcgcaccgggtgcttgcacaccaggcacttttcaagcggcgcacggtccaccggccgccgcaattcaaaaccgcggcggcacaccgggcaggactggccggggtcgtcagggttttcggaaatatactcgtatatgggcatagtaaaacgctaggctaaataaaaatcagcctagcgtcaaaatctttataaggctgcaacctttcccagcccttaccagctggacttggtcacaccggggatcatgccggcgttggccagttcgcggaaggaaatacgggaaagcttgaaacggcggataaatgcgcggcggcggccggaaacaaggcagcggttgaccgtacgggtcgggcttgcattgcggggcagcatggttaaaccgatataatccttctcagccttcaattgcgtacgcagttccgcgtagcgcttgacggtgtcagcctttttcttgtctcttgcgatccagctcttcttagccataagttcggcggaataagtagagggccggggatgaaaaatcaagcgctttttttcaatttcatcaaattcaagccgttttcaatgtcatccgtcctttttggcagcttccgcacatcggcttaaacgcctgtttcttccgcaagcggcaccatcaggaaaagcctcacaggcgtttccggcggaacagaagcagtcgattatttaactcttcctaatcatttcttccccggcggaacgggatcatatctgcaaggcatcagcataaaatgggaattcccttgacttcaatcgtatttttggaaaactttttcaagaatgttgttgaaaaacaaggttgttatgaagatctgcgtctttggcgcacttcttgcatgcccctgccgtgtgacggcggaagaggagggacccatgcaaggtctgaagattgaatcgaaaacgcataagtattccgcggattaccacatcgccaaggaagaaggacagaatccggacgaggacgaggataaaaaaaggacctgcgtgggcatgggcgagaaggttaccttgacgttgacgggaaagaaggcgctcattggagaagatgaggacatcaggtggagcctggcggacggggcgcatttgggcagctttgagggaataactgatggaaagcgtaaagtaacattgtccatcaatgaggatttgggtccgaagaccgtcggaaacaaccatacgatcaaagtctgggcatatggttcaaaaacgcagcagatgcccgataaaccgctcaaactggaagtgtgcatccctacccacatcaccgggaagcacaggaaaaaggaaggaggcggcaggggaatgattgcggacgctgaaaaatttcccggttttcccacggatgaggcacaggaccggggcaaacccggagcttccgcccagctggaattgacgatccatcccacgaaagtcaatttccagaatatccatgtgattgaaaaagacgcggacgccagcgacaaaacttttcctcccctgggaggcaggcaccggcccggagaaacatggtcccagattgatcccggcaacagggtcattgacaccatagcatggaaaaagacgatgaatgaggtgaaagccggattgagtccggatgccccggaacagaaatgggattgggcatgtaaacgttacgtgcagtctattctgcaccgggatgtttacatgctcaataccgtgacgcaaagcttcaaggtccggtggacggaccccaggaccagaaaagccgtccatgcatggatttccaaatttgaatgccaggtggaacgcgactcccagcagggaacccatgcgttttccccgcaagacaacaaataatgatccccacaataatgatgaaaacattccacctcgtcctcccgctcatccttctttgctccggcatcacgccccgggtgcagggagccgccacgctcccggggtctcgccttcccctggcttatccggaaacggcccagccccgcgcgtatccgggctaccgcatgctggcggagatgggatggatgtacctgccggtgaaggaaccgtatcctccgctctggcacctgcaggaaatgctcaaaaagaacgagctggaactgttctacctgtgcacagcccgtctgttccaaatctattgtgtgatccatattgatgacctgaggggaagacaatgccgagaactgtaccacttgtgcggtctggtgacggcagcgccgttctaccaggtggacttcagcggagagcatccgtgggaatacggaagaaggacgggagatatggatacgaagagggtagccgtttcatgcctaagccgtattataaaaaaagaatctgccggacgcatgaacgtgaaccagaaggagatcggaaagttcagcgcgttatatacagcggtaattttaaaaggattccggaaggagcaccaggcgacttccgaagaaaagctgaggaagcgatggaaggaaggggaaaagaacacgtggaaggtgcaccgggagggacgtgtttttggctgggaagaccagttcatcgtggcccagggcagaaatgatgatatgaaatatgagatagaagaatggctggaggaagatttaattcgcatcctggtgggatactttcccggccgtgcggcggaagcgcgccagtacatccggatggcgggatacgaagacaaggagatcaacggactggtggaccggaccttgggacgtgccaaggaaacggagtttctgtatagaggaggcaagaaaaagaattaaaagcagctttccgggcttatgcggtgaacgaatcctgacgaacctccacttgtttttgttcaggaaccatcccggggaagccgctccgggcagttccgggaaaaagcccatggttaaacatgattttgtcctttcctccggagagggaatggggcatcatgccgccgcacactaatcattgacgtacatgaaaatcgtagttgcatactctggcggccttgacacctctgttcttctgaagtggctcaaggaaaaatacaatgccgaaatcatcgcctactgcgcagacgtaggccaggcggaagaactggacggcctggaagccaaggccctggctacgggagcctccaagtgcttcatcggcgacctcaaggaagacttcgccgccaactacatcttccccatgatgcaggccaacgccctttacgaaggccgctacctgctgggcacctccatcgcgcgcccctgcatttccaaggacatggtggacctggccatccgtgaaggagcggacgccatcgcccacggcgccaccggcaaggggaacgaccaggtgcgctttgaactggccgtcaatgccctggccccgaacatcaaggtcatcgctccctggcgcgaccccgaattccgcaagcagttcccgggccgtacggaaatgatcgcctacgcggaatcccacggcatcccgatccgccagtcgctgaaaaagccttattccatggaccgcaacctgctccacatttcctttgaagcagggatgctggaagatacctggtacgacggcaccacccccgccgaccgtgagatgtacaagctttccgtttccccggaagacgctccggaccaggccgaatacattcagatcctgtatgaaaagggcgatgccatcggcatcaagtacgacggccttgacacgctgctgaaagaactgaacgtcaccccgaagggtgaacgcgacggctataccctgctcagcccgctgggcgtcatgtacgtgctgaacgccctgggcggcaagcacggcatcggccgtgtggacattgtggaaaaccgcttcgtcggcatgaagagccgcggcatttatgaaacccccggcggcaccatcctgctggcggcccaccgcgacattgaaaccatcaccattgaccgtgaagtgcagaaggtgcgcgattccctcattccggaatacgccacgctggtttacaacggcttctggtttgcgccggaacgtgaagccatccaggctctggtgaccaagtcccaggaaaccgtcaacggggaagtgcgcctaaagctttacaagggcaacgtcatgtacgccggacgccgttccccgcagtccctgtattccgaagaaatcgccacgatggaaggcggccatgaggaactgtacaaccaggacgacgcggaaggcttcatccacctcaatggattgcgcctgaagcagttcagccgcgtcaacaagccctacggcaactaaccccccgcaacacaacgttttcaatcaaccgtccggaataccagttccggacggttttttctttgcaacaatcctttccttttccacgtactgcccgtgatgggatttatttcatgcacatttctggcagttgtttcagcgctggcgttctgtccggtcccggccactgccgcttccaggcccaacatcattctgatttatgcggatgacctgggcatgggcatgctgggctgctacggccaggagatcgtgaaaacgcccaacatcgaccgcctggccaaacagggcatcatgttcacccggtgctacagcagccaatactgctgcccggcgcgcgcctccctgctcatgggcgtgcatgacagccactcccgctcctacacccagacaaacggcggcctggtcatcacggcggaacaacaaggctggtccaacgaggaactggaaaagaaagcggccagggcggcccgcatcaagccttccgggggagaggttttccttccggaactactgaaaaaggcaggatacgtcacgggccagttcggaaagctggagtggggcttcaccacctggcacggagagctgaaaaggcacggatgggaccgttacgtgggatacatggaccatcagcgggcccacggctattatccctccttcctctggaaagacggcgaacgccttccccttccgggcaacacgcatgccgacggcggcaagaccccggagatttacgggccgggagccacggaaaaacggagaggaaaccgggacggaaaagtgacgtacgctccggacgccatgctggcggagaccctcaagttcatggaggaaaaccggaacaggcccatgttcatcctcttctccaccaacctgccccacggcccggtggatattccccccgcagagaacaagtatgccggtcatccagccatccgccaggcctatgcgggcgccgcgggcggcaacagggaatgcgccggggcggcggaggaatacgcctccatggtggacaagctggacaggcaggtgggcgccatcctggcccaggtgcacaaactgggactggagaagcgcaccatcatcgttttcagctccgacaacgggcatgaactttactaccgcacggacaaggagcggggccgcggcctcaactgccacggcggcgttctggacggcaccggggagctgctggacgttttccgcggcagccgcgggctcatcggccaaaagaacgccatggtcaacctggccgggctgaaatggaccaaccatgaagggggcatccgcgttcccctcatcgtctcctggcccgggaccgtgccgcacgggaaggtttgccgcagcctggtagccaactacgaccatatggccacctttgccgagctggcgggagtgggcatgccggaaggcaaggattccgtttcctataaaaacatgctcttcggcaaaccttccagccagcgcgattacgtagtggtggaccacacggtcatcacgggggacggctggaagctcacgcacaagcaggacaagtggctcctttttcaaatcagcagcgacccggaggaaaggcacaatctggcggaaacaaggaaagaccagttggaaaggctccaggccatttacagaaaggaagcgggaagccccagaaaagacaggcaaaagccggaacaaccccggaaaaccgccctttttccgccgcttgcttttgcaggttgaaacttgaacgttccgcatgtagagttccccggtgaagaacaatccccccacctcccgccagacagccctgacctgcctgatgcgctggcatgaaggccgctcctttgcggaaaccctcgtggaccgggaatgttcgcgggctgcgctttccacggcggacaggcatctggtgcaggccctcgtcttcggcgtgctgcgcaaccagacctggctggaccatgtgatcgactccctgcggaaaggcaggctggacctggaaatgcgccttatcctccaactggggctgtgccagcttttcctgctggggatggcagaccacgccgccgtgtatgaaaccgtcaatcttgcgcccgcacgcctgcgggggcttgtcaacgccatcctgcgcaacgcgcttcggcgggagaaagccatcctggaggaacgggaaaaactgccgcttcccgttctttattccaccccggcgtggctggtgcagcggtggacgcagcagatggagccgcaaacggtccgcgccctgctccactggaacaacaccacgccgcgcctgtacgtccgcgccaatccgctggtccccgtgaacggcatgccagcctccctggctccgctggaccgcgctcccggctggttctccgtagacggcgccctgccgctggaagagatcaaagcgggctccctttacgtggcggacccctccacccgctacgccatcgacctgctggctccccggcccggcgaggaaatcctggacgcctgcgccgcccccggcggcaaatccgccgccatcatcgccgctaccggaggcaaggcgcgcctgaccgccacggacctccatgaacaccgtctgcccaccttgaaggaaaacctggacaggcagggttcctcctccgtccggacggcgcaggcggactggtccctcccctgccctccggaatgggaacgccgttttgacgccgtgcttctggacgtgccctgttccaacaccggggtcatccagcgccgcgtggacgtgcgctggcgcctgaccccgcaggaaatccgccgcctggccgccctccagaggagcattcttgaaaacgcctcccaggccgtcaagccgggcggcaggctggtttattccacctgttccattgacgcggaggaagacggcctggtggtcagggattttctgcaaaaccacccggaatggaccctgaaggaggaaaaactcatccttccccatgaggaaaaatcggacggcgcgtatgcggcccttttgatctgtgcttgacctcggccccaatttggcaacaatgcgtgctcctgattaatctcattccactatgtcccgcaaacccatcattgccgccaactggaagatgaacatcggccccgccgaaggcgcccaattcatcgaaagcttcaaaaacctcgttaagggaaaagacgtcgcatgcgacgtggtcgtcattccccccttcaccaccatcccctccgtgctgaacgccctgaacggctgctcctgcactgccgtaggcgcccagaacgtctcccagtatgacaacggagcctacaccggggaaatctccaccagcatgctgaatgaactgggtctcaagtacgtcgtgctcggccacagcgaacgccgccagtacttcggagaaacggacgccatcatcaacgccaagatcaagaaggccatcgccgccggcatcaccccgattttctgcatcggtgaaacgaaggatgaacgcctgggcggcattctggaacccgtgctggaaatccagctcaagggcggtctcaaggacatcaccccggaacaagtggccagcctggtcatcgcctatgaacccgtctgggccatcggcaccggcctgaccgccacctccaaggaagcgcaggaagcccacgccttcatccgcaaggtcatttccgacgtcttcggcgcggacaccgccgccagggtgcgcatccagtacggcggttccgtaaagccggaaaacgtggtggagctcatggcccagccggacattgacggcgccctggtgggcggcgcttccctgaagccggaatccttcgccgcgctggtcacttccgccaagtaagcgcaatccagccatttcctttcctgcgggccggtccttcacgggaccggcccttttcgtttccggagctccgtccggcgcttttcgccccagggcgcagtttctgccttttcaagcggcggcaatcgtgcataatggcgggaaatcatgaaagcccgcttactcccctcacgcagcaaaggtttcacgcttattgaagttctcgtggtcatcgccatcatcgccctgctggctggcgtatcctacagtatttattcccatgctacggagactgcggccagaacgcgctgcacggacaacctgcgccgcatcagcgactggggcaaggaattcgcaggccagaacggcgggaagctgccctccagcggcatgaaggacagccttctgaccgccagggagtgccggaactggtgggacgccctggcccccatcgtgaacgcagaacagcccgacctgatcgcccggaacgacaaggagccgaacatgcttccggacaccttccgctgcaagaatgacaaccggccggaaatcctcgcggcggaagattccatccttcccgccagcccggacaccatttcctacactagctggctggacaaccggaagggacgccccatgaacgtggcgcgcgggcaggccctgcgcggcaagccctggatcagcgacggcattccgcttgacgggcgcagcgtcatcacggaacaggactttgaggaaatcgtggtcccggccctggaacgccatcagggaggcatcatggtgctttacgcggacgggaaaatcacccctgtggaggatcccacgtttgaaaaagtcacccaaggctcctgagcctgcgttcctccgccggctgcgggggaattccagcggcctgacgccaggaatccgatggaattttcttctctctcccgctgattcgcctttacgaagccgggataatcattaaggttagcgttcagatgaaccagcacgctcccttcctgcatccgtatgatggaatgataccgctgcccgtggcgggatatgtcctgggcgccgttctgctgctggttcacctttacgcactggtaaaaaggcagcaggtgcaggcctttctgctggcttccccgcgcaaccacctgctggcccaggttctgctggccatcggcctgttctggttcttcctgctggtggctccggaagggctgggcgtgctgagttatttccgggtagggctggcggagtttgaaggcatccgctggctgctccagcttgcgtgtcccgttttcctggtgctgatggtcacccaggtgaaaaacctgctctttccgcgggcgctcggcatcttcggcctgatggtggcggcccctcttctcagcgcggccttcctccaggatccggtcaccaggctgctcatccccatctggtgctacattgtcattttcctttccctcctctggataggcaagccctacctgtaccgtgacatggtgaacaagatatgctccaaaccggcctggtggacgcccctctgcctgggcggcatggcctacggagccgccattctgctctgcgccgtcctgtggtggtagcagacgcattttttccggcgcaccatatccgcccacccggctttttccggaggaattcccggtcgcgcaagctgtccgggccaacagggaagacagctttccttttccagcctccgggcaggatccgtccgcgggcctgcctgctttatcatacaccccgttcctcccatgcgtttcattccaagtttccccctcctggcctgcatggccctctggctgctctcccctgttccctccccggcggacaagcccaacatcgtcctcatcctggctgacgacatgggatggtccgacctgggctgctacggctcggaaatccccaccccccatctggactccctcgccgcacagggcatgctggctacacggtgctacacggcttcccgctgctccccctcccgcgcctccatcatgaccggttgcgagccccacaaggtggatgtagggctgctggacgacgacagcggacgccccggctaccgcgggcggctgaatccggatatccccaccctccctgaactcctgaaaaaagcgggataccgtacctacctttccggaaaatggcatctggggaaagtccgcggaacctacccctgggaccgcggcttcgaccgttcccgcggcctgctgggaggcgcggcggattactacaagcccatgccggaccgccccttcggagaagacggaaaattgctccggccggaggacctgccggaggatttctacatgacggaagacatcacccaaacggccctggcctacattgacgacgccgccaaaagcaaaaaacccttcttcctctacgtggcttacacggccccgcacaccccccttcaggccccccgggaggaaatagaaaaaatgctgccgtcctaccgcggaaaatctccgcatgccatcgcctccaagaggctggaaaaacaaaaacagctcggaatcgtccctccctccgccaagctgggcatggccggaaaattcaatccttccggctatgaaaaggccacagcagagcgtaaggactacctttccaggtgcatggccacctacgccgcccaaatctccatcatggaccgcggcataggccgcatccttgcgtccctggaccgccaccgcctcagcggcaacacgatcgtcatgttcctgtcagacaacggcgcaacggcggaaatgccccagaacaacaggaacaagaaaaccgttcttcccatcggtccgctgggggaagccggctgccgggacgggtacggccccatgtgggcggccgtgtccaacaccccctaccgccagtataagattgagacctttgacggcggcttgtccgcgcctttcatcatccgctacccttccagaatccgtcccggcgcgcgctatcactcccccttcctgcttcaggatctcgcccccacctgcctggcgtgggcgcagcttccggttcccgtccacatggacggcaaaccgctcaacgcctactgggccaatcccggaaagcttcctccgtccagggtatgggactacattcccggcacctgcccttcccgcaccattttctgggagcaccagaggaaccgcgcggccctgaccagccaattcaaactggtggctcccaaccgcggcccctggcaggtatacgacatcagggacaggacggaacaaaaaaacctcgcttccaggcaccagccgcttattgaacaactgtccgcacagtacaggaagtgggcagaagaaaaccatgccgaataatgcggcacggcgggtagcctggcaggcgcgcacggaacattacccaggggcaagccctgacgttccggcaccgcagccaccggagccgtaacccgcatcatttccgggaaaaagccggaagaatatttgttccccccttgatatccgggggcccattcaccattccttttccccatccggatattgacggacaattccgcaaggagtccggccctccggacggagcttgctccggctctccatgcttttaccctgtaaacaaagatattccatgaatcaaaataaaacacatcaaaacactgcgatttaacaaatcgtttcccaaatggaaaactcttattttttcctaacaattattggaacaaaggaagccttatcattcaaagaaatatcgtattagaatgcttctaaattaacaaaaaactcattgattataaataaacttaatttaagatggcataagaaaaaacctctccgcttcctgctttcattccgcaccatttcaaccttcaatatggaatatttttgataatcaacaaataacacacctttaacaagacttgtacagcatcaccttcttttcaaccaacctttctcccgcatctttcttatgttcaaagagccctccttcctcaaaaaagcaaacctgttccagcccatcctggtcgttgtgatctccatcatcggagggacgcccatggaaggcgccaacacgggaaaaatcgtcctgctggttatcctgggcgccgctttcatcgtgtggcacgtggaatgccagaggctgatcaacaggaaccgggagatgaagaaacaggcctgcaccctgaaaaaccgcagtgcggctctttacaaaaaaacctacgccgccctcagcggggaatatgaaaacttcgccaacaagctgaatggagaagaccgccgggagaaaaaagcggacggctcccgcgcaacgacggaaagcttcaactccgcctgcctgttcctgtgttccaccatcgccgcagccctggccgaatataaaagctccctcatctttgaagtgctttacatccaggcggagcggcagcagggccagaccttcctgcgcgtcacaggctacgcgcagggagaacacaataacgacatcccgtccctgctggcccagcctccgcggcccgtgacgggaactccctccatgctggatgaacaattgttcgctgaacgccatctcagccccgtagtcctctccggcccggcggaagtgcggcgcagcttcttccggaagcgcaaccagcccccggaggaaaaatacatgcaatacctcgccatccccgtcctgagcaggaggaatgaaatcatcggcctcattgaagtctccgttaaaaaaaatccgttcatcttcccggtggtcatgctggaaacccacgaactggccgacatccgatcatggctgtaccatttgaaagaccatttcctgctgttccatgaaatagaacgcgccgtccggcatgatttgccctgatggacatccccgcccggttccgtctttccgttccgccggcggcctcacggaccgggcagcacggcaatacccattcccatgctcattggatggtggaacaccacgttcccgcccgttttccggctacctcaaaaaagaaactccgcccggaaatacttcctgcggagtttcaacgtatgaaagggaatggtacttggaccgggactcgaacccgggaccaatagattaaaagtctactgctctaccaactgagctacccaagcacttacccttgctggaagggcggaggcagtaaacaccacgccccctttcatggcaagcgcaaaatggaagacggacaaaaaaagatcaggattccatgtattcctgccaccgcgcacgccattcagctggaatgcgcgcggggcgcccctggggcatccggaccagggccagctgttgatgggccctcaccagaagatcgttgttggaggcgcggcgcatttcaaaatcgcaccagaaccgggcccgttccacggattgcagccatcccgtcgtcagaatggtgtcccccagcacggcggggcgtacgtagtcgatttcatggcggaccaccacggcgaactgctgcaaatcgctcatggttttgtaatccatgcccaatttggctcccagcttggtgcggcaggcttcaatcatgcgcaggtaggccaggttatgaaccactccgccgcagtccgtatcataaaacatgacttcgtcttccgtatgaaacatcagctccggattcatgactgccattgtaggaaggaaacggtgaagctgaaaggaaattccggttcagccatgccatgcatggtgcgtccgcgccagcgtcagcacgcaaacggaagccgccccggcccggagcagcagatgcgcgcaggcgtccgccgtggccccggtcgtaaaaacgtcatccaccagcagcacgtcccttcccgcgacgggatgacgtttgattcttttttcatccgcggcataaatcctgcgggcgtgcctgagccgctgcttccgcgccaggctggcctggggcagccggtcaggcaggcgtttcagcaccccggcacagggccagcccagttctctccccagcagcgccgccagttcctgcgcctggttgtaccccctccgcaccagcttgcggcggtgcatgggcacgggaacgagcaggcgcttttttcctccgaaccagtggggatttccgcgcacggcctccgccatcatccgcgcgaaggttccggccagatgaacggcccccgcatatttgaaggccagcagaagctccctcaatgccccttcgttcacgtatgcggcgcgggcttcctcaaaggacggagccgtttccgcacagcgggcgcataacccggacgggatgaaggaaccttccgcaggttctccgcagacggcgcagcagggtggttcaatgggcacgaaacgctcccggcattccggacaaacatgacagccgtccagtccgccccgtccgcacaactcgcagacgaaagggtacacccaggagagccattccctgaaaaccgctcccagcatccccggcacggcagaagttgaagggcgttcctaccgcccgtcctccccatcgggagaaccggtttcctcctcttccggcatgtcttccagaagcttgtctatggcttcaataaaacgccacgggcagcgtttgcgctggtacttgcgccagagcacgtcgcgcagggtcacccagtgcgcccgcgtgaattccacgtgttcccactccacatcgtcacgttccgcacggcccaccttgggggcgcattccagcttccatttgctggcgtggtggcatgccctgtataccagggtaccttcttccgtgcgttctttccacgtgtgaacttccatgggggcgagtgtagggaagaaccgttccgggtaaagaggaatttttgctagtcatccgcccttgcgcgattagtatggctccgtcatgaacgacactgaaatgatcgaatgccgcgagcctgcccttcaaatgcagcgcctcatcgccatcatgaaacgcctgcgcgctccccagggctgtccctgggatgcggaacagacccaccactccctgatttccaacatgattgaggaagcctacgaggtggtggacaccatccagagggatgactgggagcagatgcgggaggagctgggcgacgttctgcttcaagtggtttttcatgcggagatcgcccaggaagccggacgtttcaatttcaacgatgtggccgcggaagtgagtgaaaagctcgtccgccgccatccccacgtgtttgcccagtccacggcggacacgacggatgccgtgctgacccagtgggacaagatcaaacgccaggaaaaaggcgcggagaccaccccgtaccttcatggaacgggcaagggactgcctcccatgctccgcgcctggaagctccagaaaaaagccgccaaagcggggtttgactggccggacgcccagggcgccctggataaagtgaaggaggaaaccgcggagtgtgaggaaatccttcccgtgccggaggaagatccgcacgtcacggaggaactgggggacctcctgttttccgtagtcaacctgtgccggaagaagggaatagacccggaaacggccatggccggggcgaacaggaagtttgaacggcgtttcaatgaaatggaacgcctgcttgccaaagacggcctttccctggaagaagcctccctggacgccatggaggaacgctggcagcaggcgaagtccgcccaataaagtatttccatttcccggaccgggccttgttccggttctccgctttgccttttccggcgccgtctgcatgattcatgcgcgcggcgccggaatgtttttcaggagttcagctcctgcggcggcgcagcagcagcgcgcccaggcccagcaaggccacggaggccgtgccgggttcgggaaccgtgcgcaccagcgtcaccacgccgtcgcgcatccaggagtccccgtttgccaggatgaagccggcgtttttcagggcggcgtcataaaggacggaggccagggagtaatccccgctgaaggcattggtgagggagccgtcatacagcacaaagttgatggtgctcacacgggcttccaccagtttttcaatcaggctgccggagcactccgtcagcagcaggttcacgccgccggagaagtccacggaggcctgcccggccccggtaatcagcgcattggtcgtccacgcatcgggagctgtcatggaaaagttgccgtccgcatagctgatgttcaggttcggcacggcatccgttgtggaaacgccagtgacggccagggaggaaaacgcgcccagcctgatgccggaatccgccgcatgaatgagcatgtccgtcacgcgggcctcctgccctgcggccacctccagcacggagccggagaattccgtatgggccagcgccgctcccgtcctgacgttcacgttgacgccgttgaacagggcgcgggccgcggagcctgctccctgcacgattcccgctccggcggaagaacctagaaaagccctctccaccgtggaggaggcggccccggtgcgggccgtcaccgccacggaaatatcggagagggaggaagaattcagcgtattgacggaggctcccgctcccgccagcttcacggaagcggcgtaggaaaccgttccggccttcacgtccaggcgggaagccgctccctggagttcgactccggctttcgtattgagcgcgcccgcatgcgccagctccagcgcggcatggtccgttacctggtagaccccgtcccaggtgttggccgcgcccagcaccacgcggccgtttttgcccgcattgccgttcttgacgatgatggttccggaggcgccgccgggcttgacggttccgttgagcgtcatgacatggctgtttccggaggccgtcatggagtccggatcgtaacccgtcgtatccagcacaaaggccttccctccggcgttcaccaccatttcattctcattgctccagtccgcgtccagcatgcccagcacgcctccgccgttcagaagaatcgtattgccggttttctgaactccgtcttccgtgtagggagtcccggtcagggaaccaaagccggagcccaggcgcagaacgccgccgtcgttgacctgcacgtcataatcgtacagcccctgccattcgtcatggcccaccaccaggttgccatcctgcgccacgctcaattccccggccagcagaagagtgtttaccaccttgagggaacccgcgtcaatttgcagggaagccaggcgcgcattccccaccgtctgggaaaagatgcccgtcttcaccaggctgatgtagccggaatcatggcgcaggcccgtatcatacatgtcgatgtactgcccaaagcccacattgccgcaataaatccggtcctgcgtccccaccgccaggaaaagggtggtggaggaatcgcgccccgcgctggcttccgtggtcacgaaggaagcctcatcctgccccatgatgccggccaaggtgatgtgatggacgtcctccacggaatcaagatgcagtatcgtgctctgcacaccattcaggcttaaatcaaaaccggcttcttcccacgtgttccggtccagacaggcctgcaccgttccctggccgtcctgcgtcccgctcatgctgatctttccatggaatttggagccgtcatccagctggaaaacggtctggccgctgccgttggcatgctgcaggacaaggttggcggtggaatccccccggaccgtggaaatgacgccaccgatcaccctgtccgtatgggacaccgtcaccacggaatcctccgccaccgtcagcaggttattcagcagagccaccttctggataaagcccccgctctggtagtccagcgccagggaggtgccgtcaaacatccggatttccccggtccccagggctccggcatccctcatgactaccctgccgccgttgatttccgttccgccggaatacgtgttggccgtctccatcaccagggttccggctccgtccttggtcagaatggttttccagttgctggtttcatagtcatccggaagctccccgtccgcaatcaggcccccgtccgcatgggcgcggaagatgtagttgacgtcatccttcacgcggatggaggcggggcgcacttcccccctgatgagcaccacgttgtaatcctttccttcctccctttccaccattcctgttttcccggctccttccgcgccgaaggccacatggtaggtatcccggtaaaagccgttaaggcccagatttttgtccaggccctccagccagtggttgcggtcggtcccctccccttcgggcaattcattggcaaaccagacgttgtccgtggcggccacgtattccccctcgctccggttttctccgttgtaccaggtgcggatgggcgtattggtcaccgtcatgaccaggttcatgttgtccccggaaaccttgatgatgccgaaccacccgttcccgatggaaatcgtgcgggtttgaaagccgcccagcgccccgtccacgtaaatgccgctttccgtcgtcgccaggtagtattttttgtcaaccgtgtccgcttctccaaaatcgtatcccccgaaacgcaccagaatatcgccgttcaggttcaacctgccggaatcagcgatgtcctccagccccttgacggccagcaggggatgctcctgcagctcggagggcaggatggagcagtcaaaatacaggaaggaggaatcagataccgtcacggaaccgttcaccaccgccgtttcaggaaccgcaacggcccctgcccccgtaccggcgtttacggtcctgtccgtcacgatgtggagcgcataaccgggattgatggtcatgcctccccccgcggcgccccactcctgcgccgtgccgtcggaggcgatgccccgcgtcactcccagattcaagttggttcctccgtacaggacggcgctcgttttcacgttgaggctgttgaagcccagcgtcccctcctggagcaccaggcggttgaccgcggccgtatggatgtactgtgctcccgcgcccgtcttggtcagggaaagggtttccctgcttgcggccgtcaccttgccggaggtagcggaaccatacgtggatgccgtcccgaagacaccggcaaaatacagcttttccgtaccgttcacgtccagcgtcagcgtactgttggagttggtcagcacgcgcagcgtatccacttcgctccccacggtgcaagtcttgccgtaatactcgctgtcctgcgttttcccgatcaaatccccttgcagccccgccagaacggcatccttctgcaccagcaggatgtggtaaaggtccatgcgttcctttccttcaaaaacggtgccgttgtccgccgcgttcacggtatgggcgcgcgtcaggtccaccttggcgttccgcagcgcatcgtcttccacgatgagctgtacggcgccgggcttccggatggccaggatgtcgttgttggcatccgcattggcgggggagtccgcctcggaatacagaatgtagttgtccagcttgaccgtgccggtgaaattggacttttcccccggggccaggctttcatcgcagatgtggaacatgcttacccacttgtcctggccgcccgccgtcgtggaggtatagcccatcagcgtcagttccccatagccgtccagcctgccggtcagggacagcgtgcgccagtggcgggaagtcaggtaatcccactggtagccggaggaacctgcgccgggcaggtcttccttctccgccagggaaaggggggagtagccgatgaccaccttcgccgtgtccttggaggacgtcccgatccggatgttgttggcaatggaggggttgcggtaagaggaatccagctccgtggcaaaggggtagttgacatacagttccgttccgtccgccatgcggatgtccccggcgcccagggctccttcacgggcggccagaatactgccctcccggatttccgttccgccggaaaaagtattgccggtagccagggtaagcatgcctgcgccctccttgaccagctcgcccgcgtggtccggtccggcgtccgcaatgctgcctgcgccgccgtccgcggcgtggaagacatagcccatgccgccgttcgcctccttgtccacggagaccgtcaggctggagacgcgcaccgttccgtcaaggatgacgtcaaagccgtccacggcgtggccggataaatcctgcatgccgaagaagacttcacgctccccgttgcggaacgtcaggccgccttcccacgggctggagcccgccgccccgtcggaccacacgctgccgtccggaaccttggacccgttcccctgccagacgtagtaattgaacttgtccgcgtcaaaataggtgccttccagggaagtggaatccagcccggttacgagcatctgccattggcctcccccctgcacattcagggtcagtccgctgtaaacgtccagctcccggtaaatccagctgccgtcggcatccctgcccgtggcgtacctgaccttttcccgctgcacggcatccgcaaaggagagggtgttcccctccgtcacggaaaccagtttgcgggagtctccggactgaatgccggatgcgggcatgattaccgtcagcaggctgccctccgcaaattgcacggaagaatccagttgaaacgttccgtccacatccagaaccagccccttgttgaagacaagcgttccggcggaccgccagttcattccccccagccgggaagccgcttcatggtaatccagcgcgagggcggcccctgccgcaatgtccagcaagccgccggaggaagtggaaaaggaattccctacggtcagggccccatccgcccccaggcggaaaacgccgccctgaatgtccagactgcccagccggccagaataaacggtttgctccccgcttcccttcttgaccagattgatgactccggtgccgtccgcctccacaagctgggtattcttgtagctctcattcttctctgtccccacgtagtagccgccgtccgcgcccgcggcgccgatcattcccttgaattcatggttctccgcaccgtcaatggtcagggtagcggcagtcccattgcccaccgtcacgcgggaggaggaaccggccgtggccccttccaggcctgagacggtcaaatccccctccagcttcagaatcaccatggagggggtccctgcactgcccgtcagccagcctcccagcccggcggggtccttgccgccctggcggatcacggacaggtccatgaccgtggcgttcatattccccgccgcctgaagctggacgggcgtattatacccttctgaggagaggctggaacgcggcgccgccgcctggaccacgccgctgaaaccgctcatgtccacgcccgtcaggtcaaaaatgcttacccggctgcggctggtgttctcaaacaccagcgtccccgtaccggaaacggtaccctctaaaaaagccgtgcgcgccgtagagctcgtgaagcccagatacaccttggagccggggccgccgtccatccggatattcaggccgtaatgcttttccttgttgccgccgtcgctgacattgacgctgtccaggaaaatatctccggaaccttccatccgcaccgttccgtcaaatccttcctccagggcaacgcttccacctccggtcacggtgatgtcctgccccgcgcgcgggaccgcggcaaggctgccggggccggaaaccgcaacggcattctctgcaagatgcagcccggattccggcttctcccggtccccatggctttccgcctgtccgtcttcctcccttgcctcttcctccccgtctgaagaaccggaattttccttcagcgagtcaggaagaaggggggggggggggggggtaggacggcttaccttgaaagagttataactcttggagcggttatttcccgataccagggcatttgccagcacgccgtgcaccagtttcacctgagcatcttcgtggctctggaacgtgtattcctgatccatgtgggagacggccaccttcttccggtaaagttcggctggcctgctcttccgcttgaggctccacttaccttccggattcagcgggaaagcgggactgaccagagccagacgctccggttccgtttttccggcatttccggataccggctccatggcggcgctcaccatttttccatggctgttttcaaaatagaacgcgccggagtcttcccggagcccgttctttccggctgcataccgcaccagcaaaccgcctccctgctccagtttttcataatccgccaggttcagcaggtattcattgtcatccagaactaccgcgccgtcctccgccagcggaactttttctccggaccacggcttgccctcggccagggacgctcccgcacacatccccagaacaccggcgaaacaggtaataaaagcaatattcatcatgatgacggataaaaaggagcgcggcgtatacaccctggttttctggctgtcaaatggaatgtctgtttttttccatcctgctggaacacaataccatacccgggacgatctgcccatctcccgtaaaaacgggaaaaaacggggcatcagggcgcttcataaaaaccgccagccttgtaaaaaaattccctgccgcagcccggtttcccccggaagcgtgaaacaagaaacggaaaagggaacgcgtgcctccgcggcggaaaagaggtccggaatcaggccatcatgtccatgttcggatccttccaggccgggtcataccccttggcatagctgaacacatgcttgtgcatgtattcaaaatactgctccttctgcatgggggtaagccgctcccagatggccacgttcaaggcgcggcacaccttctgcatcattttcaaggtaagctggcgtccctgccgggccttttgaacctgcttgtgggtaagctgttccggggaaatctccaccaggtcgtggttggtcagatgccagcgcttcatcaattcgtccaaaggctgttctccgtggttgcgtccggtttctgtagcttcctcttccatgcgcctttcttcgtgccctatttccgggaaataggcaatacatgattgccccatcagcactttttttgcatttccagttgcccggcgtgctgatacatggttcaatcccgctctgttgcaataagatgattagcgagaaagaggaattactggaatggcgcaagcgcgccaccgcacagcccacgggacgggtagtcctggacctggaggcagacagcctgcaccgctatcaggaaaagatctgcctgatccagtacgcggatgaaacgggctcctgcctgatcgaccctctctccattgaagacatggggccgttttacaactggctgaaggaaacggaagtctggatgcacggggcggattatgacatgagcctcttccagaacgcctgggaaacgctgcccgccatgatctgggatacccagacggcggcgcgcctgctgggcttccgccagttcgggctggccgccctggtggaacatttccacggcgtagccctgagcaagtcctcccaaaaggcggactgggcgcggcgccccctttccccgaccatggtcacctatgccctgaacgacgtgaattacatgctggacatggcggacaaactgacggccgccctccgggaaaaaggacgcatgggctggtttgaagagatttgcaggcactccatggaccgagcccgggaacgccatctggccggccatcaggacccctggcgcatccagggctgcggcaagctgaacaggaaagggctggccgccctccgggaactgtggacatggcgcgatgcggaggctaaagcgtgggacaagcccgcgttcatggtctgctccaacgcggacctcatccagtggagcctggcccttcaggaacagcgcaccgtgactcctccgccccgcttccactcccacaggcgcagccggttcatggacgccctccagaaattttacctgctggatgaagacgactatccctgccgcccgcgcatccagcgccgccagcattccgaccagtttgaggccaatctggcgcgcctgtgcaagctcagggatgaaaaggctgaagaactgggcatggaaggctccttcctgattacccgggcctccctggaagccattgcggaagacagggaaaaaggcgtctccaccctgctgaactggcagaaggaagccctgggcttttaaccggccccgtctttccggcgcgcttccggcatttccccctgaaccggaccttccgcggcagaaatgccccgccggctgcgtcatgactcaacgggggtgatttgccgcttttcctcctcctgccccatcccttaggatagggcccctcctccccctgcaccacttacctattcacctgacaacatgtaccgtcccctcatcatcctcggccttctgggagccttcgccgcccagggcagacaggcaggaaccgaaatgctccgcccggaccagccggaacctccggcccacctgctggcggacatcaatttgctgggcggggattacggggacgaaacggcccccatccccaacgattcccttacgcaggccctgaccggcctccactccaaagcgcaccgcgcgggactggaattcctggtggaaaacgccttttcctacaactccatccaccacccggctccggacaagcccggcacccagctctggtacctgctgcacgcccacgccaattaccgcctcatccaggcgcccagcaaccgggaaacgtggctgaaactggagctttcaggctccactgcgctgaccggaaagacgtggaggggcggcaacatgaatgacgccatcggcctgacgggagacacgcatacggacatcttcggggaaagaatcttcttcctgccggaaatagcgctcctgcaaaccttcaaccggggaaaaagcgccatcgtcgcgggcgtggtgaaccagacgaattattttgacaccaacagctacgccaattcctccttcggccagttctgcgcctcccccttcgtcaacaaccaggtgattcccatggcggattccaacctgggcgtcatcttccagcaccagttccacgaacagtggtacgccatgctgggcggcaacttcaccagctgcccccagaacgcctccccgctgaaacacacggacggcaagaatttcaacgtcctggcggaactggcgtgggtgcatgattccggggccgtcaagctcacccccttcatggcccgcatcaacgaactgccggacggggaggaaaggaagaacctccacaccgtggccgggatcgccctgaacgtggagcagcagcttggcggcagcccgtggaaggccttctgccgcgcgggctggagcgattccacgcgggacaacttctgcggcgccgccgtccaatggtccggcggcttcgtttgcagccagcctctccagcacctgggcgtctgcgaggagggggaagccaaccagttcggcattgccctggccgtgacccgcccggacgacgggagcatggcggaaggccgttccagaagcaaaaaggaagtggtgatggaatgccactataacatttccgtgactccctggttcctgatccagccctccctgctgtggatttccaaccccgcgggccgggacgacaccggaaacgccagcgtcttccggctccaaaccatcctgacgttttaagagccgccggaacagccgcggaaggcttccgcccccatggcggctctcttttccccgttgttgatttacctggaacaggggagcgtctttctctacaatgcacggctagtctctcccgtcatgccctccaaccgccattcatacacggtcctggcagccgcctgcgcctgcgtgcttgccgtgtgcgccttccttttctggcagaaccggcagaagaaaaacaaactggcgcggcagtacgcggaactttccatgccgccgcccgcacagggcggcactccggcgcagcagaaggccctgcttgaaatactcagcgggaaacgggaggccgtttctcaggaaaacctccttttccccgaaacacgggacgccgctcccctgcaccgtaaaaagacggaagggccgccgccccggagccgagaaaaaatcttttccaccccgccggggcatgctagggtggcaggcgatgaatcatgccgatttagaccagttgctgatccttcaggaaaaggacgtgcggatctccaaactccggaaggagctggcctctctgccggaacagagaacgcgcctcctgcgccagatggaggccatcaagcagaaggccctggccgccaagcaggaagtcgcgagcgttgagaagagcatacgggacgtggaagccgccgttgaaaccaagcgcgcctacgtcggcaagatgaaaaccctccagtccaacacccggaaaaacgaggaataccagatgtgcattcaggaggtggagaagacggaagccgccattgacgccctggaaacctccgagctggagctgatggaacgtctggaagccgcgaaaacggatatggagcagaaaatccggcgcgcgcgggacgcccagcgcgagatggaggaaacgctggcccgctttgaccggacggcggaaacggacaaggagcttctggaccacttgaatgcggaacgcgcggacctggccgccgccgttccggaggattccctgggggaatacgaacggatgaccaaaagcaagggagtcccggtcattgtgccgatggatgaaaaaggccactgcggcggctgccacatggtcattacggacaacgcccgcatgaaggtgctgggcggccacgaaaccgtttactgcgacagctgccaccgcatcctccactgacggagtttccaggcgcgccgccgggcttatcatgaaatccagatcggaagagtttgaagagtgggggacggaagtcatcttcggccgggccaaggggttccgcgcctccatgatgcgcatggtcctgcgcggggcctcctggctgttcaggctggtggtgctggcgcggctgtacctgttccactccagcatcgcgaagcaggccaggctgggaacgctggtggtcagcgtggggaacatcaccgtggggggcaccggaaagactccggtggtggaactgctggcccgcaccctcacccagcgcggccgcaaggtagccatcctgacccgcggctacaagagcgcggacctggacaagccccaggagtggaaggacaaggacggccgccagccggaaaacctgcccaagatcgccagcgacggggaaacgcgctacctgggccccctgcattccggagacgaacccttcatgcttgccaagaacctggacggcgtggcggttctggtggacaagaaccgcatcaagtccggcatcttcgccattgaacacctggggtgcgacaccctgctgctggacgacggcatgcaatacctgaaactggctcatgaactggacatcgtgctggtggactgcggcgcgcccttcggcaccggggccatgctcccgcgcggcaccctgcgggagcccaggggcagcctggcgcgcgccagctacatcgttctgaccaaatgcggcggcaagccccaggatgatctgatcgccgccatcaggaagtacaatcccgtggcggacatcatcgtgagcgaccacggcccccggtacctagaaaacgtgttcacgggggaacggcttcccctggaggccctccaggggaaatgggtggcgtgcctcagcggcatcgcgcgcccggaaagctttgaagattccctgcgctccctgggcgcccacgtggaaatctgccgcaggttcccggaccaccactggtttgaacaagcggaattgcaggagttctacgaccgctgcgcggaccgggccatggacatgatcgtgaccacggagaaggacgccgtgcggctggaaaaaccggaggaagacccggaggttcccatttacttcctgcgcattgaggtggagatctaccagggccgggaggcgtgggagcgctgcgtggaccgcatctgcggaatttcagagccgcgcccgcgggatgaatggatgccttcctcatccttttgatatggcttccgtttccggaggttctccggaaattcacctcttttatgcagagaaggccgcttgacttgcccggaaaatcgtgtgaaacaagagggcagtatttttccatgaaggcatttaccatcacctccattctggctgccgcgtgcctactcccggcccattcgctggccgaagccgcagcagaaaacaagacccaggccgccgctgtccaaccggcggcaggcattcccaagcaggatccccggcttatcaagggaaagctccccaacgggctgacctacttcatccgcccgaacgcagagcccaagggccggttcagcatccgcctgcgcgtcaatacgggttccctgaatgaaacggacgacatccagggcatctcccacttcctggaacacatggttttcaacggaagcacgcatttcaagcgcggggaaatgattcccgccatgcagaaggaaggcctgggcctgggcggggacgcgaacgcctacaccgcctttgacgaaaccgtgtacatgatggacgtgcccagcatgaaggagtccaccgtgaacctggccttcaccatcatgagggattttgcggacggcgccctgctggaggaaagcgccattgacgcggaacgcggcatcatcaccagtgaatacaaggcgcgggattccgccggctaccgggtcatgaaggaggtcttctccatcatgcttgacggcaccaggattcccgaccgctaccccatcggcacgctggaagtaatccgtaccgcgccgcgggaaaaatttgtaaactactatcagacccattacgtccccagccagatgcagctcgtcatcgccggagacatcacgccggaacagggcaaggcctgggtggaaaaatacttcggctccatgaagaaggacaattactccttccagacggaccggggcgcgctcaagacggccacggaaaccaccgcccactggatcaccaacaaggaggccaccagcacggaagtcagcgtcaacatcgcccgtccctacgtgaagaagccggacacggtcgccaaccgcaacgaggacattcccctcaacgtggcttacgccatgctgaaccgccgtctggaaaagatggcgaagaatgcggactgccccttcatttccgcggaaggcggacgcatggacgtgatggaagcggcgcaagtggacgccatccagacccaggcggactacaagaactggaagccggccctgaccgccattgaacaggagctgcgccgggccatcgaattcggcttcaacaaggaggagctggcggaagcccgcagcaacatcactgccgccgcggaaaacgccatcaagtcctggcccaccgtcaagtcggaagacgtggcctccgccatcgcccagagcgccgcgcaggacaaggtcttcaccacgccgcaggaagactgggccatctccagggaagtcgtggaaaacctgacgcccgaacaatgccaggccgctctgaaggaagcctggaccggagccttcccccgcgtgatcgtcacctccaacaaggaaaacgcccagggaagcgctgaaatcatgaagacgtaccaggacgcccgggcctccaaggtggagccctaccaggcggacagccggaaggacttctcctacaaattcggggaacccggcaaggtgacggcccgcgcggaagccgctgacctgggagtcacccagctcaccctttccaacggcgtgcgcgtcaacctgaagcccacggagttcgacaaggattccatcaacatcacctttgccgtggacggcggggaactgagcaggccggaaaaagcctccgggctggaactctttgcgggcgccgtgatgaacggcggcggcttgaaggaccactccaacgacgaactggccgccatcatggcaggcaagaaagtcggcgtgggcttctccatgacggaccgctccttcctgctctccggaaataccagcaaggaagacctggaaacgcagctccagctccagacggcctacctgatgtaccccggctaccgccaggacggcgtcaccctgctccgccgcgccatccccatgctttacaacaagctgaaccatgaggttcagggagccatgaagatgcaggtgcccgccatcctgtacaagaacaatccccgcttcaccttccccgcgcaggaacaactggcttcctatgaggtcaaggacgtgcaggactgggtggacgcccccctgaagaacaattacatggaagtgaccgtcacgggggacttcaagacggaagacatcattcccctgctggaacgcaccgtaggcgcggtgcccaaacgtgcggacgcccctgcgaagctggatgaaaaactgcgccaccctgccatggcggacttcaacttctccaaggacctgacctatgattcctccattgacaagacgctggtctgcctcttctggaaaacgcccggcggagaagacaagaagctggcccgcaggctgaacatgctcaaggccgtcttctatgaccgcgtgttcaagggcctgcgcgaagacatgggggaaacctactccccctccaccgggctcaacatcagtgaaacctacccggacgacggctacatcatcaccctcagctccggcgtgatgcgcaacaaggatgccgtgcggaatgcgattgccaggattgcggacgacctcggcaaggggaacgtcacccaggaggaactggaccgcgcccgcaaccccattctcaactccatggaccgcgcccagcgcgacaacggctactggacctccgtgctgagggattcccaggccaaaccggaacggctggcccagcagagggaaagcattccggacgtgaaagccatcaccgtggaagaggtcaacaagcttgccaaagacatcttcggcaagggagaacatctcaacctgaacatcctgccggaccatccggccgcggaagctccgcctgctgaaaagcaggcggacaaacccgatgccacccaggccgccgtctccacggcggctttttgcattcacgccactgccgtgaaaaccataaaaaaagactccggcaagaatgactacgccatcatcatctccgaggaaaccgccgccatgccggaatggaaggccgtggcggacaagctggctgaaaagcacggaggctccatcgtcaccgtgaaggactccatgttcgccaagctggacacgctcaagaaaatggctccccgcttcatggccgtggtcgcgcgaccggaggaaatagaccgggtgctggtcaatgacctgcaccgcctgacccgccgcctggacgacgacccgtacggggactgcatctggggcatcgtcacgggctacaccccgcaggacgccatgaggatagcctctgaaacgcagccgctcgtgatcagccgctccatgggaaccaccaacgtggacgcctcccgtttcaccgacagcatgagcatcacggactggcagcccttccagtacctggaacagcacaattccaagggcaaggtaacgcccgctttttacgtgaagggcctgaaggaacaggaccgcggggatgaaaccacgctgggcgtgacgcccaagctcgtggaatactgggaactttacgctccccagctcttcgtcacggcctcccacgccacccagttcaatctggaaatgcctttcggcaaggggatcatcgtctccggcaacaaccggttccacgtgctggacaaaaagcagttcaaggaattcaccaccttcctgcgcggcgcgatcttcaacgggaaggaggacgacctgctctccttccttgagagaatcaaggctccggagattgaaatcaagccggttcccgccgtctgggtagccgcggggaactgcctggtaggggatactaaaaaaacgaagaattccatggccgtcaccgccctgagccactacggcttcaaccagctggtgggctacaccgtcccctcctggtacggcaagggcggctggggaacgctgggactcctgttcagcaaccatgacgcctccagcctggcggaagcctggtacctgaacaaccagttcattctggacgaaaccatgacccgcttccccaagctcatgaacgtcaactttaacgcgccggacatcaacggcatcaaggacgacccggactttgccaagggcatgaactccgccggctacggcatgggcaaggaccagatgggcctcatccatgaccgggataccgtggctttttacggggatcccgcctggacggcgcgcctggacgaatcccgcgctccgtccccgtggcatattgagtggaacgaccccgcggacgccgccaagggcttcaccgtcacggccaacaaggacgccaaggcgcgcctgggcgtctggttccccaacaggatcaccgccaaaaaggccaccgtcaccattggagaaaccgccactcccgtggagaaggccggcctgctgaccaacgacttcctcctgctccgggaactggagctcaagaagggggaaaaagccgtggtggaaatgaaataggccggaatatccggccgccgttcctttttccatagacaagcgggctccaaacatggatactcccggcaatcaatctaccctatgactgattactccattttcttcatcatcgccgtggccgcgacgggcgtgggagcgcttctgtttctcctgtccctgttcgggctgggggaacatgacctggactttgacgcggacgccggcggcgcggacgtgggcctgctgtccattaaatccggcatcggcttcttcctgggcttcggctggggcggcgtgctcgcccagggcctgggctggggaatggccgcctccctggcagcggccttcttcaccggcgtgctgatgttcctgatcatcggcatctccatgcgcttcatcatgagcctcaaatcagacggcaccctgaactatgaaaccctcaagggcatgcacggcaccgtttacatcagcattcccggcaggcttgaacgcggcggacaggtgacgatcgcccatcccagccagcttctgtacctccccgccgttcaggaaggggaggaatccctgcccgcaggaaccccggtggaagtagtcgccgtcacggcaggcgtcgtcaccgtcaaacctcttcattaaccaataaacccaaccatacaccccatccaataccatggaccaaatcatccctatcgccattctggttctcttcatcatcctgacggcctcctggctgttcagccgctaccgcatgtgcccgccggacaaaatcctcatcgtcttcggcaaggtgggcacgggccagcccgccaaatgctaccacggcggttccaccttcgtgcttccggtcctccagtcctacagctacctggacctgaaccccatcaacattgacgtgcccctccagggcgccctctcctcccagaacatccgcgtggacgtcccctcctccttcatcgtgggcatctccaccctgccggaaatcatgcagaacgccgccgcgcgcctgctgggccgctcccgggaggaaatccgcaacctggctgcggaaatcatcatgggccagatgcgcgtggtgatcgcctccatgaccattgaggaaatcaactccgaccgcgaaaaactcatcaagggcattacggaaggcgtggacgtggagctgcacaaggtgggcctccacctcattaacgccaatatcacggacattcaggacgcctccggctacatcagcgccctgggcaaggaagcagccgcgcgcgccatcaatgacgccaccatcaaggtggcggaagaaacgcgccgcggggaaatcggcaaggcggaagcggaaaaggaccagaccgtccaggtggcgaacgcccgcgccattgccattgagggccagaacgaagcccagatcaagattgcggaatccgccgccaagctgcaggtgaagcaggcggaggccaagaagctggcggaagtggcccagaaggtgcaggaagccaagaccctggaagaagcctacgaggcggaaaaggaagcggaaataaagcgcgccgaacgcgaacgcgccacgcaggaggccaacatcctggtgacggcccgcattgaaaagagccagcgcgaagtgcaggcccaggccacggcggaagtgctcaagctggaacaggaaggcaaggcgcaggccctgctcatccagcgcagggcggaagcggaagccatccggcaactggcggaaggcgaagcccaggccacccttctgaagaaaaaggcggaaggggaaggcatggaaatggtgggccgcggtgaagccgccgccattgaagccgtactggaaggcaaggcccgcggcttccagcagatcgtacaggcggcaggctcgtccgacgccgcttccagcctcctgattaccgaacagctcaccaagatcgtggaactccagtccggcgccatcaagggcctgaaatttgacaaggtagtcgtcatgggcaacggaggggattcctccgtgggcggattcgtgcagaatctggtgaaagacaccctgcctctccacgagctcggcaagagcgtggggctggaactgccctccttcctgggaaaatccacggaagagaaaaaggcccctgccgcagccgctcccgcagccgccacccaggcggccacgactgcaaccaccgttaaactgaactgatccgcagatgaatatggaagccgtcatgggcgttttgctcggcatcgggctgggagcggcctgcggcttccgcatctttgtgcctctgctggtagccgccatcgccatccggggaggcttcctgacggtgacgccggaattcgcatggctgggcggcacggccgcgctggtcaccctctccgtagccacgctgctggaaatagcggcgtactacatcccggtcatcgaccacacgctggacgtgctgggagctcccgccgccatcgttgcgggaaccatcctggccgccggcttcatcggcagcatggaccccatgcttaaatgggggctggccgccattgccggaggcggagcggcaggcatcatccacggaggcatggccgccatccggggagcggcctccgccgctacgggcggactgggcaactccgtcgtcaccacggcggaaacggcttccgcctctatcgtcgccgtgctggcctgcgttcttcccgtcgcggccgttctgctggccgccgcggccatttacttcctggtccgcacggggctggtgctgaaaaggaaactgcgccgttctccaggcggtccggagggagaaatctagccaaggggaaaaaacccccttctcccggcagccgtccacgcagcgattcccccgtgaatgaaggccccgcggccttcatcaataacccgccgccaggtccccggcgaagattttttacataacttccgaatccgggctcggcacagccactttcttccccgccggaaagccccatgcccggaaaaagaggcgttccggcaagcattcggctcattgacaaggaaccggaagcagggtaggatgcggctttcaacctctcttccaccgatgaataccaaactcgcccttctgacgctcgccgccgccctcggccttgcctcctgcaacaccatcagcggaatcggaaaagacgtggaagccatgggcagcaaaattgacaacgcctcccaggccaccagggagtccatgcagtaaagcggaagaagcatccggccaccagcctggagcctctttttaattcaaaagaggcaaagatttaaagtttcccccatcgtttcatggatggcggttctccatggagtgctctgccgcccgcggattacaaatccggggtcaagggccgattttcatatcaaggaacttatgctgcctgaccgttgcaccatgggagaccgtttccgtgtgggaagccttccggaatgaggaagccggctcttggaacgccgcaagcctttgcggccgttgaaatatacgtatcctgccaggacgcactgattttcagggaaaaggattcgctgccgctcgggttaaatacggatgccccaaggacttgcagcgcttcataaggcatcgggaccattccatgttaatctgtaacggatttgtaatccggcatattcccgcgggcttgaaagtttccctttcaagctctaattcacatcgcattcatatgaagaaaactctgatcctgctttcctccctgctggctttttcctgcatgacggcgcaggccgctatttatacatggactcccattgacggttctaccgactggagccaggcctccaactggcagacggaaaccggcgccagcgccgatgttccgctggtcaatcccaactggggcacggtcaacgtatccggcaaccataccgtggtatgcggacccggtaccaccgtggaaggatggacctccaccatcaatgtttccaacggagccaatgtgtcccttcagaatttcaccaaattccagcgcacgaccgtctccgtgggtgaaggctccacgctgaccgtcggcaaaacgagcggttccatcgtagccaactgcgaccagaacatgaactggacggtatacggcacgctgaacctcaccgccgcactcacctggaacgccaacagcaacaacttgttcgtggacctgggcacgaccggcatcctgaatcttacgaaccagaccgatctgggccgtttcgccttctccgcctccctgggcgacctgattacggaaggaactacatttgagctcgtgacgcgtgaactcgtcaacggagtgggaagcgccgcaaccagcaacacgaccatcacgggcggaacgcagagcgacgacatcgccgccgaggcacttaccgctgaaaacgtaggcaagtaccaggtgttcacgaaggacggcaagatttacgtctcctacatcaacggcgtgccggaaccggccactgtctccctgagccttctgggcctggcggccctgatgctgcgccgccgccgttaaaaacggaaggttaatttcttttcaaagggcatgccggacatacggcatgccctttttattgcttccgtcacacatcgtaaaaaaacctttttacagggagcgggaacattccgtggggccggaaaaccggaggctggaaagaaggcgtcacgcccatcaaagaaaaccgcttcatccggatggatgaagcggttttcgtccatggtcacacacagtctttttacatggaacggctggtggagcgggcggcggaattaatgtcactgccgacggcttccacgtccttgcctactccgccgatcgtatggcaggaaacacacccaagaagggtggcgatactcagaataatcaatttgcttttcatcgttttattggaagagttccgagtggtcagactccatttctccggactccgttcaaagaacccttcatgatgccgcacaggcgctcctgtcattctccgttcttgccatgcgcacccgcaacgcttaaaaaacatgcgtcaacgggagaaaacatccggaggacattccgtccccgctcccggaatcattactatttactaccaagatgatcaaagtagccattgtaggatacggcaacatcgggaaatacgccgtggacgccttgcgcgccgcgcccgatatggaactggcgggcatcgtccgccgccccggcagcgaacccgtgcacggcatcaagaccgcaagcagcatggaggacctgggccatgtggacgcggccctgctctgcacccccacccgcagcgtggaagaaacggctctgcccctgctcgcccgcggcatcaacacggtggacagctttgacatccacggggacatcgtgaacctgcggcgctccctgggagcacaggcgatcaagcatgacgccgtctccatcatctccgccggctgggacccgggcacggactccgtcatccgcaccctgatgctggcgatggctcccaaaggcattacgtacaccaacttcggtcccggcatgagcatgggccacagcgtagtcgcccgctccaaggaaggagtggcggacgccctttccctcaccattcccaccggttccggcgtgcaccgccgcatggtttacgtggtgctgaaggaaggagccaagttctccgacgtggagttcgccatcaagtccgattcctatttcagccatgacgacacccgcgtgcagcaggtgcccgacatcgacgcgctgaaggacatgggccacggcgtgctgatggaacgcaagggcgtttccggctccacgcagaaccagatgttcacgtttgaaatgcgcatcaataatccggccctgaccgcccaggtcatggtggcttgcgcccgagccagcatgaaactggcctccggctgctacacgctgccggaaatcgccccgatggacttcctgccgggcgaccgcgaagagttgattgcccagctcgtctagagcgttccggcacgtctttcccggacgcgcggcaacaggggcaaccgttcccctttccttccgcacctttcccatcctccggcccccggccggaggatttttattgttccacaaccaccagcctgccatccacggcattcacccgggccggggtgtgggtccgttccgtccagtcccacgcgcgtgccatgtccgcccaaaaagcggcgtggggggaattcttttccttcaataaacgcgccggagtgggcacgaagggataaatctgcacgggaacgcgctgctgcccatgaatcagggcctgttccaccatggtgtaaatttcctcaatccccggatcggtcatcgccaggcagccaatggaaacgtcccggccatgcaccatgatgaagcttcccgtccggttcagggagcggtcataggcattcggatagccgatgttgaaagccagatggtagttgctgcggggattcaggccggacggctccacttcgtaaaaaccctccggggtctgcttgtccccctccttttccttgggccccagctttccggaccacgcggcaatggggtaacgcttggcaagcacgtagcgttccgccttatccggcttcacccacagttccagcacggagtcttccttcacggcacgcaggaatacaggatcccccactttggccccgcagaggcccaggaaggaattcagcacgggcgttacccgttcccgcgcggcatcggcacggttgacggaatcctcggcacacgccattttaagagtcaccaccacggaggccagcagaaccaatcccagcccggccagcaacacgcttttcttcataaatcatgtataatggcggcattcgttttgacaaggacaaaacccgccgccctttgccggaagtgaaaagaacgtcgggaacggcctgcccctccactccgggaacaataacctttccggtgaaaagccgccggcatggaaggccagttccccgttcttccggggaaaggatgggcaggtgccgtactccatcatgcgcgggaccgtctccggcccttccttacgcaaaagaggggaaaggatgtccgcagaaagaaaaaaagacgccgtgaagggattcccggacttggaggaagggcaggccccctgccgggaaatatgccatggaatagaaaaacatgcctgtactggaaatgcagcctccgggaaggtatcctcaccccgttagccgctccatcccggcacgcggcgcatcaacggaaggccctttcgtaaaaacggcctgcgcaccttctctttttgcgcgctgccgcagaaagaagcggcatccaccgaaccgccatggaaatagaccaccttctccccatcaccacacggcaggaattaagaacgtggctggaacagaaccaccgttcctcctcctgctgctgggttctcacgacgagaaagccttccccccatgccattccttacctggacgccgtggaagaagccctgtgcttcggctggattgacagcacccgcaagaagacagcctccggctttctggcccagcgcctcaccccacgttccaggaaaagcaaatggtccgagctgaacaaggaacgcgtacgccgcctgaccaggctggggctgatgaccccctatggagaaaaatgcctgccggaaatggacccggaggcgttccggattgatccggatattttagaagcccttcagaaggacccgcgcgtttattccaacttcctggcctttccccgcctgtaccgccacgtgcgcctggataccatccagattaagaaaaaccagccggagctgttccatagccgcctggaaaagttcctgaagaatacccgggaaaacaggatgtttggagaatggcatgacggaggccggctactggaagagtgaaaacggagcttcccgtattttcccaacagacgccggaacgccgcatgccgatgcggcaactaaacgaaaacgcggctgtaagccgcgctccttacgcaacagggccgttccggacaatgccggaacggccctgcgggtccgggagagcagagcgtctccgctccactctccactctcaaacttcaactctccttagaagtcataccggtagccgatacttccgttcaccgagttcgctccgtcccggaagtcggcattgccgtccacgaagatcgttccctgcgttcctaccggcacgctcagccctgctccgatttgcagagccgtcattcccaccttcgctcctctgactctctgcgtgaagccggggttgcccagcagcgccacattggcttctccgcggcggtctcccatgtcctgggccgcgttgacacggaactcagccagcgcttctcgaccgaagatgttgctgcctacaaggcccatccagcggccgcccagcgcaaccgttcccgtcgtcaactcctgtttggcgacgttcaggcccatgttgccggctcccgtttccgtgtagccgtccattctcgtggttactaccgaggcgttgaccaggggctgcaggatgctgctcctgtcttcattgaggtacacgtcgtaggtcagttcatacatcgctccaaagccccacccgttggtgttgccctgcgtgccgtagctgcccgctccgtagttgaccgtgcggttgagcttcgcgtcgttccacccccccgtcaggatgagcgtgtgcgcccagcgcttgctctggtagcggccgaagaggttggcgtagtagctgtccaggtgaccgtccgcagagtccgccgcgctggccgtcaggtcgccgtagttggccgtgaaggccgctcccatggtgaagtggtcgctgaggtccacgtccatgcccacggtgccgccccaggtggtgagctggtagccgctttcatcccccctggtgtccagcttggcataggagcccgtgccctgcatccacatgtggaagtaggggaggtccgcattgacgtaggcggggttcacgcccatctggttggtgcggttgcgtatccagttcatctggtcgcgcagggcgtcccgctgggcgatgcccaggctggtgaccgtgctgcccgcggcggcggccagggaacgcctggcggcggagggattgttaaccatgtcgtcattgagggcggccaggaagtccgtaacggcctggtccacggaaccgtgcctggcggcttcccaaatcagattggcgcccgccatggagttggccgtatcagcgacgccggcataaatattgtccgtttgttcctccgctttcagaacgaccttgtccccttcctgcaccagatgggcattcttgtaataggtgaggaaaagaccgcctaccgtcagcgtattttctcccaggtcaatcgttccggctccggtgagctccatcagcgtgagttccatcggattgcccgatttccaggtgatgttgacgcccggaattgacgtgacgtggaaggcggctccgttttcaatgacaatgtctccggaagccttgatgaagctggcggtcatgtcggcatcggtattcagggtgaaggtggtggtggaaccgctgccgaaggtggcgttttccacgctcagggtggtgttgaccgccgtcaggacgttgtcgctggcctggatggccagcttgccgttgttcaccagattaccgtagctgagatgggcgccgtctacatccgccttgccctggagaaccaggtttcctccgctgaccgtcagatcggtatccgcgccggagctgcgcaggacttgggtgcctgcgccggaaacatccagtgttccggcccccagcgttccatcatacgtatgcgtttggccggaagccgcctgaatatgcagggtctgcccgttcagctccaggtctccggcgccgttcaggccaccggcagagccgtccgccgccaggctcagggagccgtccaggtccagcaccacgccggaaagcgcgctgtccgccgccagtcccagggaagcgccttccgcaatgttcagcgtacctgttccgccgatttccgtgcgggaaaggccatcggtagctcccgtcagcgtcaatgttccggaagaaccgatatccagctttccgccgttggcgccggacgccagcgtctgggccgtcgtgtggcctcccatgccgattaccgcaagggagcccgcgtccgtggaatcaaggcgcagggcttccacattggccgtgccgttaagctgaagcgttccctgttccgcaatgatgtctccggccagcgtcacattcccggacagggtgagcttgttggctcccgtcttgaccaggtccgtattggccgcggcaccgtccaggccgctgatgttcccggcaaaaacggtgtccactcccgttccttcatggaaaaggttgttctgcaattcgatgctgcccttgttgtccgccgtgttggtgacaatgaggttgcccgttcccgtctggcccggattggttcccggcgcggtcaggttcttgatcaccatggagccgtccgactggacgtaaaggtcctggtccacgatcacggcctggtagaagttgagggactggttcgtaaccggattgtccgcactgcccgtgccgtccacggaggagacgtaaaccaggtccgtatcaccggagaggacgatgctgcccccgttgacgtctacaatgccgaagcccagcgcggcaaaaagcggattggccgcaatgtggcccttgagcgtttcaaggtcctgcgcaaagccgccgttcgtcagcaggatttccagattgccgcccgccgttttcatggcatccatgacgctggtgaggtccagggtgagggtggagccgtctccaaaggagatgctgcccaggttgtcccccgcgccttcaaactgaatcagggaatccgtccccgtgaaggggtctccggaaatgttccccgcacctaccgcaaggctgctgcccgtgccggtcacggtccaggtggaaccctgcttgagcccggtgagctgcgtcccggcagtggcggtgacgaccgttcccagcccggcggcatccaggccgcccagggcgatattgccggaaccggcaaccgcattgacatggaccttgttcgcagccgttcccgcatagttcccggcgttcgccagcgaaccggattgaatgaggatgttggtagtggccgccgcgtcggaaaggtccagcgtacccttggccagcgtgagcgttcccgtcaggccgttggcgcggtctcccaccgcaaaggtgcccgtggtgttgacggtgaggctccccgctccggtgacagttccggcccaggcggcgttatccccggtcccgtcgcccagctggacggaggagttccgggcaatcttcaattcccctgtggacgtgttcgccccggtaagaaccagtttgtcgccgccctggacgtccagagccgccgtatcaatcacattgccggtataaagcaggtcactgcccgtgcctgtgtagttgacgcggtaggttccggcccctcccatagaaacggccttgatgaattcgcccgttcccagcgtggcggccgcaccgccgttgccaaaggcaagaaccacattcccctgcccggagtgcatggttcccacaaaaccggtgaggtttccggtgaagatggtggtcagcgtcgggttgcctgcagccgtcgttcccaggttggccccggcgtcactcgtcaagtcgcccccgaacgtcacggtctggttggaattgccgttcagccagcttcccgccgccctcacatgaatgtcggcattgacggaattggtggaatcactgacaaaaaagccgcgtccgtccagctccaggctggcgctgccaaaggcggccgcattcgcaaaggccacttcattccacgcggcgttggtgccgttgcccaccaacttgaacgtgcccgtaaaaccgctgttgtctccgctgatggaataacggcctcctccggggaatcctcctccctccttgtgccccagcaccagggaaccggccccggaaatgcggccggacagcgtatccgtcatggtgctggcatgggcgcggttgtccctgatttgaagagtggcatcctgcgcgatggagatgtttccgctccaggtccgggtggcgctgttggccccgatatcatagaaaagcgtgccgccgctgacggtgatggcgccggtgaaggcgcctcccagggtcgtgttaacggtcagcaggccgtccccgagcttgacgatgtccttgttccccagttcctgggtataggtggcccacgcaatattattgccgttcgtattcacctggatggccctggtactggcggcggcgtcaatgaggccggaaatatcctgcgtggcccccgtgccgtacgtgaaaatgccacctgcaaaaatgagcttgttggtcgctaccagccccagcgttccttccgtcgttcccgccgtgttcagcaccagttcccctccgttcagcgtcaccgtgccggtgcccaggccctggacggcattcaggttgagggtgccggccatgatggtcgtgccgccggagaacgtattggtcccggtattttcaatggtcatctccccttccccccgtttaacgagggacatcggattcgcgccgtctacaagggctcccgtgcccgtgaacgtataggccgtttccccattgttgaccgtaaggcgggcggaggaaacatccccgtcaatagtgacggcggagagggccacgcctgccaggtcttcaaagttggcggatttggcggcatcataaacgaccgccgtcccatccttgtccagccagatggctgcgcctcccgctgccgtccacgtacccgcggctcctccgttccagttgagggcttcacccagcgccttgacgcgcaggtaaagggtgtttccggacagttccagggcataagtgtaatcgccggaaagaccgctgggatcaaaggaaaagttgctggccgtcagcgtgccgaagctgtctgccgtaatcagcttgtagtcgttttccatcgtctggtccaccccgctgatcgtcagggtcagcgtaccttccgaattgaaggaaagcgtgccgccggactggatgatggaagcgctggaggaattcagccccgtcaggtccagcgtcaggccggaagccggggaaagagccatatcacccgcagaggtaagacgggccccggctcccatcgtgatggaattgccgaaggccactccgccggcgagcccgaagctgagttctcccccggaaaccgtcagggcgttcgcaaacccggcggaggaactgagcgtaagcttgcccgtgccgctcttggtgaaggcgctccgcccatccagaaccgtggcattggcaatgattgcatccgtgcccgctccggcggatatctcgtcaaacccggtaacggtcgcgttggcgaacatgtccgctttcgtcacgccgttcaggttcagcacgcttttggtgaccacatccccgcgcccctggccggaaagagttgtcgtcccggtgaagacggcgtcattacccgtaatggtcacgttggccagcgccgtggtcagggaagtgccgttgaccttctggccgcccgcataaatggcggcattgttgaacgtgcctccgctgatggaaaggttggcttccccgatcgtcaatgcggaactggtgttgttgcgttccacatacgtgcccagggatatttgcgctccgtcaaatgtaccccctgtaatcgtgatattggtggaaccaatatttccggtaagggcagccgtagcggttccattaatgtaggaaccgccccagatctggcctgtatacgtcccggacttgaaggtcaggttggtggaacctgtgatattgaacgtgctttccccggtttccacccagcttccccccgcaatcatggccgctaccgtgccactgcccaggtccagcgtcatattggtatcagtaaggctccaggctgacgtgcttaaacgggcgcccgcaaaaattttcttggttccgtctccggaaaaagtagctcccgtgatagtcgtcgtcactccctgcgcaaacaaactttgcgcaaaggatcctcccgtgatttccatggaagcggacgaattggctgcaatatttgctgcggaacctgctgcggtcgcatcggacaagccatacacattcgcattatactggcctcccgcaattctcaatttggccgtatacgcattcgttccgtctcccaactggacgaggcctcttcccagaagggccacggagccgttaaaagtccctccgtccagattcagggcaacgttcccgagaatggttgatttttgacccgcaccacgtgtcgttccggccgttaccagttgcgcgaaggttccgccgtcaatggtgaatgtgacgtctcccgtatggcggaaggattcctgccccagccctatgcaccacctggcgttaggcgagctaaccgaagttccggcccattcccccccatggatattgacaatgtatgtccctgtcgtctggaacgcatccgtcttgttgccatcccccaccaggcagaatccattgatcgtccctgcattctggtccacattgagcgtgatgtcggcagccacgatccggtcctgattgctccaccccatcaattgaggatttgtattcagcagggacgttcccgccccgatattgattacaaaggaattggtccctcccaaggtgacgcctccggcggtacccgcaacattccataactgcagcttcgtataaattcctccttccagattgagaacccggttatagccgtcttcataggtcccgctttccgtaatatccgtcaaatagatgtcaccgggggaatccgcctgagtcactggatcccccgccggcggcgtaatcgtatactggtcgtcggcaaaggatatcgtcgtttctccgttgcccgtcaacgtataggcagcccatgacggagaaatgaaacaggccagaagagcggacaggagagggaggggcaaatgcggacgcataattttgtaacgtgttgataattaataataaattatataccagactatatcgttagtaataattaacggatttaaaatccggagtcaatgacaatttttaatgccaagcgctttaggacaattgaacggcttgatgcgtaggaagggaagaagagtgggaataccggcgccaagtacgggcattatcaatattttattatatatctggtctcattaaggaacatttccggattttaaatccgcacgggtatttctcccgcttcttccagcaagcgcggcctgcatgcaggaaaaagtgatttcttgtcttgcattcccatgggagtgcctgtataagcctccacgtccccgccgcaaggcaggaacacagcatccaaggtcacggagcggtagctcagttcggttagagcgccagcctgtcacgctggaggtcgcgggttcgagccccgtccgcttcgccaccttgcttcaaagaaacaaccgcctccgggcggtttttttgtgcccggaaagtccaggacctgggaaacaggcagtccggtggcaatgttttactggaaaagagggccggaacccggtagaatgggagccagcattacaatcatgagcatactttcggaccgtctttccgaggaaatactgcaagcccgccagcgcgtttacacggttggcgaaccgactcctcttcaacgattgaatctgccgggcatcaaggccccggtatacgccaaaagggaggacctgggccccatccgggcctataaatggcgcggagcgttcaattgcatggccgcactgagccaggaggcgcgggacaagggcattgtggccgcctccgccggcaaccatgcccagggcgtggccctggcggccagcgtcctgaactgccacgccaccattttcatgccccgctccacgccggaagtgaagcagacggaagtacgccgccacggcggcaggcacgtgaagatcatgcttcatggagactgctatgacgagacggccgcagccgcccacgagtacgcggaaacccacggaagcacttttgtccatccctatgacgatctggtgaccatggccggacagggaacgctggcggatgaagtggtgatgagcggggaaggcccttttgaccgcgcgtacgtcgccatcggcggcggcggactggccgcctccgtagcctgctggctgaaaaagttctggccccacatcaaggtcatcggcgtggaaggcgtggaccaggcctccatgaaaacctccattgagcagggacaccgggtgaacctggattacgtggacgttttttgcgacggaaccgccgtccatatccccggagaattgacctatcccctttgccgggaactgatcgacgagttcgtgaccgtcaccaataacgaagtctgccaggccatccgcgccatgtgggaatcttcccgcgtagtgccggagccctccggggccatgagcctggccggattcctgaaacaatggaacgaaggtgaagtgaagccggaggaaaagagcttcgtggtcatttccggagccaacatggatttcacccacctcacccagatcgcccgccaggcgggcatcggcaaccatgaaacgcgctacctgcgcatctccatggattccaagcgcggccaggtgctcaagtatctgcgccatatcccgcaggataccacgctggtggacgtgcagtacggcaagacggagggcaacacccagtaccccgtgttcggcatcgccgcctctgacgaagacctggacaccatccgcacgacgctgaagaagaagggcattgagtttgaagacatcagcgaggacgacgacgtgcgcttccgcatgattcactaccaggcggagctgtgccagcatcccctgttcgtccacatcgaatttccggaacgcgccggagcctttcttgacttcatggaacgcatcgcggacctggcatccctctgctacttcaattacacctataccggggaacgcgtgggccgcgccctggtgggcatggagtttgaatccgcggaagaccgggaaacggtacggaagcgcatggccggattctccaggaacatcatccgggccatccgggaaatttctccggaggccttccaccggattatgggaagcagatagttaacaattaacaggtaatagttaatagatattaactattggctctccttccatgcttccccccatcatcctggcctcccagtccccccggcggcgcgagcttctggcgaaggccggcgtgcctttctccctcgtcgtacgggatacggaggagctgaaggacgccgccatgcctccgcaggaactctgcctgcacaatgcgcgggcaaaggcgcaagccgtattccgggaacatccggattccaccgtcatcggcgcggatacgctcgtttttctggacggccttcctcttggcaaaccggaagacggggaagaggcccgttccatgctccggatgctctctgcacggacgcaccacgtgtgcacggcggtttccatccggtcccccctgggagtgaaagacttggccgtgctgacggaagtgacgttccgggagctgaaggaagaggacatccgccgctacatggagctggtgaatgtgatggacaaggccggctcctacgcgttccaggaacacggggagatgatcatttcctccgtgcgcggagatacggacaacgtaatcgggctgcccgtcagggaggtggtggaatgcctgcggagcttgggttactgagcattaaatgtacgtttaacgttcctgccttcttcatcagggattcattttgcgcagtttccagccagacggcgactggatttcaaaattggaaagcatcttgagggatccgctgtggttccctttgtcgttcaacagctcaatggttttctctgcctggggagataccctgaatgatttgtggcccaaccaagtaacctcttttccgtccttgcccaaaaagacggagcaatcatcattcaaataaagaatttcattcgcggcggtatcccctttaaccgttttccaccgcccaataaaagaggcaataacacgaactgcagagagttccttttgaatggccagcgcttcatttattttaccgagattggcgtactttttctgaattttaagaagggcatccaagtaggccttgtccgtctttttcctttccttcattcttttagacgccacatcttcttgaatttccttcatctgtacgcctactttaggagaaactttttccatccgggacagttcatccctcccaacaagttctttggcggacaagcggttctccaaatattccacgactttctgcagttccgccgcagaagcgaagtcattcttcgcggcatatttgttcatggaatcccgataggctttcaatttggacgcctcatatttctgattaatggaagaaaggatgttctcatattgttccttcaatttccgggcatccggaggcagggattgggcgcttacagtggcccaggaaattattccgcacaaaataatacagcacaacttattcattatagatgctggatataatatatccaacatacaaaaattcaagaaaaaagaatgatttccctgccgaggatgcggtttctccgcaatcaagaggaaatcatttttccgccagaaaacggctgaatttgttataaaacgccacagggagcacggcttctatcagggtgccttcctccacgtattccgtggagagaaccttcccttcactatgcatggcggccgccaggtcgctccgggtatagggaatcaggaaccgcgcgcgccggacgcggctttccagcatctccacgcaggcgttcagcaggtcttccgcgccatgcccctcctgcacggacatgggcaccaccctgccgttgaagtggggcttcaacagggtttccagcgtgtggcgctcttcttccggcacaaggtccaccttgttcaggaccacgatcatgggcttgtcgcccgcgcccagctcgccgagcacttccagcgtggtttcataatggcgcacggcttccggatcggaggcgtccaccacctgcaccaggaaatccgccagcacggcttcctccagcgtggatttgaaagcctccaccaggcggtggggaaggttgcggatgaagcccacggtatccgtcagcagcaggggctgcccgtggggaagttctattttccgcgtcgtggtgtccagcgtggcaaaaagcatgtccttcgccatgacttcggaaccggataccagggaaagcagggaggatttcccggcattggtatagcccacgatggcggccgtggctacggcctggcgctcccgttccttgcgctgcgtggcgcgctgccgggtcaccagggccagttccttctgaatggcttcaatcctggcgcgcgccaggcggcggtccacttcaatctgtttttcgccctcgcccctggcggctccgccgccgcccttgcctcctccggaaccgccgccctggcggtccaggtggttccacatgcgggccatgcgcggcagggaatactgcatgcgggccagctccacctggagggtggcctcccgcgtgcgtgcgcgccgggcaaagatatccagaatgacctcttcacggtcaatcacgcattcgtcaatcagccgttcccattcgcgctgctgggagggggaaagcatgttgtcaaacaccacgcagtccgcccggcagtccagcgccaattgctttacttcctgggcttttccggtgccgcacaggaatttggcgtgcatgtcccgggacttgatgaggtgcttgcctgcaatgctgatgccgaggttggtgacaaggtcttccagctcgtccagcatggcctgtttttccctggcctcggaagggtcgaagtagatggaaacgagcatggctcgctccaccatttccggcttttcacgaatttcaaacatattcaagcagttaacggaattgcttgctggaggtgggctggtagtccttcagcgcgaagtccgcgtgtttgtgacagtcacaaccgcatgaagagaggatgccggccacgcatgccagcgtcaaaaagctgatcagtctcatgcggctatgagacctgtacggagtatcctaggcaagcaaattttacttcatcacgcctacttttccgcaaaaccggcgcagggttccttttccagacgggacttttccaccgtcggcacggccttcccgccctcctccggccaagagcctgccggaattaatccgattcttcaccgtcttccgggggcgtctcctccgcgtccaaaccgctcatccacaggttccatttttcaatgaaggcgcggtccatctggagcagcgcattttcctgctgggcgggggaaatggtctccgtcagactgccgaaaataagcagcggcttggaatacgcatccgccaggggggagaattccgcaggctgcttctggcggcattcccgcgccagggcatacagggagttgaacggtagctcgttccagctgacctggtacgcatcactgccttcccggctgtcctgcggttccacagtcagcagatgccccttcatccctgtcaggcgcaccttggagccgtctttcagcaccaggggttttccaggtttcttttccaggagagcgggcagaattttctccatgcgggtgaacaggggcagcatttgatccgtcatttcccggcgcacggacagtctggccttgacggcgggggaggaaataaccttttccgccccgccgtaaacggcggaggccttttcaaagtccccggtttttttcatgacgtccgcagcttcccggcaaacgtcttcatagcttctggactgagcggccagcagggtttcctttttcttttcctcctccagcgctttttgtctttcctcctcctttttcctctcagccatcttcacggcttccgccgcctcccagtcacgggctgtctggtactgcattctcaaatggtccagcattccttccagcgcagcataggctggaggcatcgcggacacttccccgatcatcatctgttcccgcaggaagtctgcggcggaccgtttggcctccacttccgccaccgtcttttccggcatgtcctgaaggcgtttcaggcgttcgtactggtccgtatatctcttgaggttgttgagccaggcggaagccagctcacggacgttcctgtcccggtcgtccgccgcatcggccgccaccttgtccagaaaaacgccgtattccggccatttaccggcaaagtaccaggatttcagcgccatgcccacatagtaatgcacggccagatcggagttggaacgcaaacccggcattcgggaagaccagtccccggaactcaagtacatgaccaggttgccgacgtccctggagcgttccagttccgcagggtccttgcaggcctccaccttcctgctcagctcttccaggcgctccaccccttccgggaactggccgcgcgtccacatgcacagaacctggttcagaccggcccagagtgaggtggaaagggggcagtccggctggtccgccagatccccgaacatggcggcggctttcaccaggtctccccggttcagggattcctgggcttcattgaacagcttgccgaagcggatgctgcgctccagccgcgattccgccgcagccgtgtcctccggggtagtgcccgttcccgccgtaggagtgagcgccggagggggtgttcccggggaagcgcccctccccttctgccatgccgcccagccccagatgcccaaccccagcgccactacggaggcaacggaggaaatgacgataatgcggcatttcctgcggcggacgcgccgcgcctccgccgcgcgccgttccgaccaggtgaggccggattcctgcatggccagggtgtattcctccagggcctgttccacggcatccatcaattccggataggaggagaacctgtcttccctgtcaaaagccatcagcctgtccacgatgaagcaggtcatgggggagacgtcattgaccacctgttccaggcggggaaggttttctttggtctccagaaggacatcggaagactgggaagcgtccacgcgggggggagcgcccaccagcaaatggtacatggtggctcccagcgcgtacatgtccgtccggaagtcttcttctcccctcagcagcgtttccggagctgcgtaatagggagtgacccatatttcccgctccacgtcggattcactgtgcagcagggagaggccgaagtccacgatcttggcgactccgtcaggagactggagaacgttggcgggcttgatgtccctgtgcatgaggcccgcgttccaggcggcgtccaggccgcgcacgatatccagcgtcaggcgtagcaccttgtcctccggcacgcgttcttccgcggtaatcagggcatccaggccgctgccctccaccagttccatggcaatgtaaaaaaggccctggtcgcgccccacggcataaatctgcactaggttttcatgggaaacccgcgccatgatctgggcctcccgttcaaagcgttcactgcgcagggcatccccggcataggtgtcattcagcaccttcagggccacctcccgccccagcacggaatcttccgcccggtataccacgctcatgccgccttttcccagttttccggtaatccggtaggggcccatgcgcgttttcacgcgcgtcagcgcctggcagcccggacagatggcgttggcatacggaggcagttgggaaacgtccatggcctgcccgcattccgggcaatgaacaatgttgtcttgctggggattcatgaacgcagggcgtcggggcgggaatcggaaaaaggaggggcgggaatccggcgcggcagaggctgttcagcgcatccggcaaaagtccccctccggatatgagcagggagggaccccatacagggtccctcccgcaaatttcattcctcctgtcaggagagggccggcagggaagcggcggctacggcctggccgtggcgcttggtcttttcatccggcacgcggagctggatcttcagctcggggaattcggtgcgcagcacttcctccgccttgtcaatgatgatctggccgccgtctccggaagccacacggcccaggaagagcaggttgcggatatcatagaacctggcgtagtgggcaatggcatagccgaagtgcacgccgatggtttcataaatcttgcgggcgcgttcgtcgccttccgccatggcggcctgaacctttttgagctgttccgggaagggcatgccttcaaactggaagccggcgcggggagccagacgggctacggcctgctgggagaagtagagggcgcctacgcccatgtccttggaccattcgtccacgccgccttcttccgagtaatccacgggagcgaaggccagttcattcagccagggcttgatgtggccttccgggtccacgtagccggcggcttcggatgtgcccatggctacgccgagcacggcgttgtcgttcatgcccatggctccggcgagggcggtgacttcaccgtcgttcaccacttcaaaggggatgttgttccacttttccttctggagggtgcggaacaccttgccgagggtcttttcaatgtcttcctggctgacgccgcggaacagggaggaggtgcgcacctcgctgttgatgatgacgccggcggaggaaccgccgatggcgtccacccgcggaaggtgggctgcggcgcgttccagggagtcctggatgccttcaatgtggtactggggatccttctggaaataggggtcccagaccacttcttcggaatacaccacttctccgttcaccacggcggcgcatttgcggtcggaaccgcccaggtcgaagccgatgcggtagccgtccaggttgcggcccagggtcatggagccggaatattcctcaggcagttcttccacggacaccttcttcacttcaatgggggagccgtaaatcttcttgccgatgaaatcccagtcgaattcgcgggcgccgcccttgcagtagcgggaggccagcatgtccgcaatagcgtcatccccggcgacgaggatgatattgccgcccttctgccacagcaggaatttcacgatgcgttccacataggtctcattcagggcaacgttttctccggtgtggggaaggagcttgccggaccagcggaagcaggtcccgtcattgcgggtcagagcgatgtccacttgatgagaagcgggatcggcggcggctttggcctcaaaggcttgattccaaagaacggccggcacgaagccggggtccagcacaggcgtgattttgggttgaatattcatggcaataatccgttggaaatgtagcatacccgcttttctttgaaaagtattcattcccttccttcatgattttttttgcggagtacggggcgatagctcactttctgctggaaaatcaccgtgttttcactaaagaagcaggtgtccttattccggcgtggcgctccggaagggcggcctattccacgcatacctgtttcatgaatgaattaacggaccagcttattaccctgttctcctccgccctgattgccgtcatgttcatcgccgtggcggtgggcatcttccgccaggcccatgcgccgaacatccagcgccccctgaaatggcacatccccgtggaccatctggacatgctggacatcgccatgtgcggcatcatcgtcctgtacttcagcctgggcgccctgatggctgcggccacgcctccgggagcctccgctccgcccaccactacaaacatggagctggacggctacaagattttcaacggcacctgcctgaacctcatcctggccttcgtcctgctggtgcgcatgttccacacaggcagaatggaggcgctagggctgaaaaaacattccctgaaagcccttctttatgcccccgtggcgggctatctgctggtgctggtcatccacttcctgctggacagggcgggcctgttccagtggattgaacaggtcacgcacgctccggcggagcagtccatcgtctccgtgctgcggcattccagcgatattcccctggttgtggtcatctgcttcagcgccgccatcgcggccccgctggtggaggaactcatcttccgcggctacctgtacccaatcatgaaaaagtacacgggcgcctggtttgcgctggtcaccacgtccctgctcttcggcatcatccacgtcagcctggtgcccttcattccgctggcaatcttcggggccatgctggtgctgctgtacgaatacacgggctccatctggacgcccatcatcgcccactgcatttttaacaccgccactctcatcaacatcctgtatcccggcgttctccttccctatggaacctgatcccaccatccggcagacgggggaggacgcgctggtggcccggctcctgcccctgatgccctccaacgccttcctggtcacgggaccgggggacgattgcgccgtgacccggagctccggaaaccgtcaattgctcctgaaaacggactgcgtggtggaaggcatgcacttcctgcctggaacggatcccgaactgatcggcaggaaggcgctggctagggccgtctcagacatagcggccatgggcggcacaccgcttcacgcgctggtgaccctgttcgtgcatgcggaccgccccgtctcccaggtggaaggaatttaccggggaatgggacggctggcacggcaattcggcatcagcattgccggaggggaaagctccggactgccggaagacggcctcatcatcagcgtggccctcaccggagaggttgcggaagggaaagccgtcctgcgcagcacggcgcgcgcgggagacctgctcgccgtcacgggcgtgctcggcggcagctttcccacggggcaccatctttccttcattccacgggtcagggagggcggcgtactggccgcctccggcttggccaccgccatgatggacctttccgacggtctgggaaccgaccttccacggctggccgcggcctccggactgggattccgcattcatgcagaactccttcccgtgcgcccgggcttcaccgcggcgcaggccgcaggagacggggaggattacgagctgctggtcacgttccgtcccggcgaccgggagcgggttgcccggctggccgcggagcatttcccggaaacgcccttcaccgttatcggggaaatgacgacggaaccctcctccgcccttccgtcaggctacaggcatttcaactagccggataagggaaaaaccggaccggaaaccggcaaaaaacgcctgcggaactattccgccgccttctcctcttccctctcccgctgcatatagggcagcagctgttcgtacgtgtccttccccatgtagcgcttgatggaacgctccggagacttgaaaatgtccaccaggatcaggcagtccagcacatcgccgaaatgcttgtccacgctgaaggacaggatttttccgttcagcttcaggtactggcgcagcagcacgggaattcccttgccgtcctcctcaatgtccgccacgagctgggagagcccctgggcgtccgtcaggccaatgggcaggatacaggattccgaccttttcaggtccgccttgcggggcggattgtaggctttcacctcatgcaccagcacggagtccatttcatgcgccttcaggtaggagacgatgagggcacgggaaaggttggtgtaatcacgggagatgcttaccgtgccgaacaggtagcggtaatggtggttgcgggccatgaactggccgatgccctcccagatgaagccgagggccagcggccttttctggtattccggcacgatgaaggcgcgtcccatttccagggagcggtccagcaccttcagggcggcgggggtaaaggagaaatattccccgttatacagccctttcacgccgtagcgggcgatgatcttgtccgtctcccccatgcggtaggcccctgcaatcttccggtgggtcctgtcccacaggaacaggtgcttgtaatggttgtcgtacgtgtccaggtcgcacgccttgccggagccctcccccacctggcggaaggtgtattccctcaagcgccctatttcaatcaggatattggggatttgcagggcgtccgccacgtacacgtcccagtctccgttctcctggcgggcatgcaggcattccgcgggcagtgcgtcaatctccgcctgcatgtcctgcacggaaacgggcggaatcagtgcggccatcttcgccttccggtccttcctgtgcacatggggacggcggctcttttcataactcttgcccagcaggtaggtgcgcaggcgcagatgggaaaccatggcttcatcggaatcatactgcccaagctggctgaacggaatgggcttgcccaccacgatgcggtgcgtacggcgcccgtcacgccccacttcacggggaaggaaagccacgcgcgccttgcggttgatgagggaaacgccctggaacagcagactgttgcgccccggaaaatgcacgggaaccaccgtcgccttcgtcatgcggatgatggcggcgatgttcgcgttccagggatcgtccgtcaccctcttgtgggccagggaaaagctggaggccgtgccggcggggaaaatgcccagcacgccgcccttccgcagccaggagatcatcttgcgcatgccggagagattcttgcgcttggcgttctcatcctcgtacacgtccaccttgatcagccagggttccaactcctggcacagggaaagctgttcgttcgccagaatgcggacgtcctccctcacgcgggtgagcagctctccgaacatgatgccgtccgacaggccgtgcggatggttggcgaccacgaccaccggccctttcttggggatattttccagatcccccgggcgcagttgcagcttcaggttcaaatgtctggaagcaagctggaagaaattctccggagaaccggattccttgtcgcgcacgatcttgtcgtacgccttgttcaagcgttccaggcccagcaacttttcggcggacgcggccaccagggcgggaaggcgcgtattctcatccaaaatgtctctgatgtccaccatcttcgggtgtttgagttgggccatgccccgctgtataacggatttacaggaaaaagtgaaactctttttgcacgggccgccggaacgcagtcttgatttccacggggcgcaaagctacaatccaagcggctttagcccccatttccaacatagaagacactcatgcatccagccatcgccattgacggtcccgccgcatccggaaaatccaccgtcgccaagctcatcgcggaccgcctcggctacacgttcatcaacaccggggccatgtaccgggccgtcacctggtatatgctggaacagggcatcgaccctgcggacacggccgccgtgctggaagcgctgtcctccgttcccctctccttcggaaaggacggcagccgctccgtggtcctgtgcggggaacgcgtgctgggtgaagaactcacgcgcccgcaggttaacgaccacgtctccaccatcgcggccattccggaagtgcgctccctgctggtggaacggcagcgggaatacaaccgccgggaacccgtggtgatggaaggcagggacataggcaccgtggtatttccggacacgccgttcaagtacttcgtcaccgcctccgaggaagtgagggcctcccgccgcgccgcggaaggcctgacggactccattgcggaacgggaccgcaaggactcctcccgcgccaccgccccgctggcccaggctccggacgccctgctggtggatacgtcagacatgacgatcgaccaggtcgtccgtttcattaccgacaacattcaacaaaaactctccgccagatgaactccttctactgggttttctacacgctctttaaaagcatttccaaagccttcttttcctggaaagtcgtcaaccgggaaaagctcattgaagacggccccgtgctcatcgtcagcaaccaccagagctttctggacccgcccatgctgggcatctcctatgaggacggcatctatttctttgcccgcaagaccctgttccggggcattttcaaatgggcgcttccgctttgcctggccatcccgatcgaccaggaaaacccggacgccgccagcctcaagcacgtcatccgcctgctgaaatccggcaagcgcgtgctcgtcttcccggaaggttcccgcactccggacggtgaaatccacgacggcatggggggcatcggcctcattctgagcaagacgaaggttcccgtgcagcccctgcgcatcagcggagcgtatgaagccttccccatcggcgcccgcttccccaaactccaccccgtcacggtcacggtgggagatcccatcccctttactccggcggaacttaacgccaagggaaaagaggcgtaccagcatttgacggacaggatcatggacgccatccgcgccctccctgcggaataatccctccttcccctgccccatgatctccaggctgaaattaatggacttccgctgctacggaagcttctcctggcagattccgcagcagggggccatcatcctgggaaacaacgcgcagggaaaaaccagcctgctggaagccgtctgcttcctgctgcgcctgcaatccccgcgcaccgcccggcccggcccgctggccgcccacggaaagcaggccttcggcatccgcggagagctgccggggcaggcccggcgcatcctgtggaccccggacgctccggacctccgcgtcaacggagagccgcgcaaggaccagcgcagctatctggctgacagctaccccgtggtatggatggggaatgacgatctttccctggtgcaggccggagcggacgcccgcagaaaatacatggactttctgggcagccagtggcaccccggctacaggctggccctgttcagctaccggagggcgctgaaaacgcgcaactacctgctcaagcacaggcacagggacaagctgcagctggacgcctacacgcgccagctggccctgcacggcacggaactgaaaagcctgcgcgccagcctgctgacgctgctggccccccacatcaccctcgcctaccgcagcatcggcgaacgggaggaacaggtggccgtggcctaccgcgcctcggaggaaggggacctgtatgaacggctgtgcgccgccgtggaccgggacatccggtacgggcaaacccagaacggcccccaccgggacgacctggacatcacgctgaacggcaggagcgccgcacagttcgcctctgaagggcagcagcgcaccatcgccatctccatgaagctggcccaatcctccctgctcacggaagaaacggggcatacgcccatccacctgattgacgacgtcttcggggagctggaccccacgcgccgggtggcctttctgcaatcgctcccggcggacgcgcaaagcctcatcaccaccacccatctggactggctgcacgataccccgtgccccctgccgtccttccggctggaggattccacgctcaaaccgctctaaacaaactgaggagaatcacgataaacaagaattcaccccggcggcatttccggcacgttattccttcacccaaacgttcagaatctccacgatgtacatcttgtggaaatcccgcgcggcgtaccactccggtacaatggtcttgtccagaaaggcttccggactgagagcctccgcatacagtttgcggcattccagcaccaggcgcgcttccataaaactcacgttgccgttctccgttgcgtacggcgtcagtccggaggcggccaccttgtccgtatcccgtccgctcgtggtgccgcaaacagtcagcgccttgtggtactcatggctgaagaaggaaagcgtgaactcctccccggcctcaatgaagccgaaggtatggcgctggggacggataaccacgaatgccacgggcttcttccacatgaagcccaggccgccccagctggccgtcatcatattgaaatgctccggcgttccagccgtcaccagcatccagtcgtgcccgatcaactgcatggcgttatcccgaatctcctttggatcaatctttttcatcgcggtctctaacgttcgttcgcgtaccatcctacacctctccagccatatgtcaaagccgcggagcggctgggatgacgcggaaaaggcgtgccccgccctgccggaaacacccttcctttggagttgcatttcctaattagcggccctagcatttccgggatgaactataccgcgctggaagacaagctgggttaccgtttcaaaaacccggacctgctcgtgcaggccctcacccaccccagcacggacagcaagccggaaacgcgccggacatatgaacggctggaattcctgggcgacgccattttacagcttgccgtcacacagtacctttaccgccacatgccccagtctccggaaggggagctgacccaactgcgcgcccgcaccgtcagccgcgccaatctgggcaaatacggcttcatcctggggctggacaaatatattgccctgggaaaaggggaggaacgggccggaggacggggaaaaaactccatcatcgccaacacgtttgaatccgtcttcggggccatgtcgctggactccgactatgaaacggccaaggccgtggccctgcgcgttcttcatgaagcgctggactccgcggccacccaccccaaggaaatcaaccccaagggggaactccaggccattcttcaggacatcctgcccgaaactccttcctatgaaacggaagaaaaagggcagagggacgccgaaaaccgttttcactcccgcgttttctggcatggacacgccatcggttccggccatggagccagcaagcggaaggcggaagtggccgccgccgcggacgccctggccgccaaagcatggctccgcattaccgtgtaaccttcaatgggacgggtggctattttgtcacccttaagccttggacagccctgtggctggtttgatagacagaagccgtctccgtgaggaagaaccttccccggaagaccttctcacagacacacaccaaccatagaaaacaaatgaaaacctatactctccccgtcatcggcatcatgactctcggagccgccgcctttgccgccgccacgccttccaccggagacgttctgctggcccgcgacagcttttccacctgcaaatggctcggcgaacgtttcaagtggttcaatgcggaacgggatcacaagaatccctacatccaggaattcaacgtttccctgcgcatgcagtacggactggactggattgacccgaacggcgaagggcgcgtgatgggtgaaaaggaaggcaacggccgccgcttcaacgacgaatggcgccgctttcgcgccggcttcaacatgaagttcctgaaaaacttcaagctcaacaacgtctggaacatcggcggcatggacggtctggaaagctacaacgcgaaaaccaacacctgggacacctccgacctgacctactccctgtatgaactgaatctggaatacaagggaggccccgtcacctacgccatcggcaaaatgaagccgcgcatcaccggggaataccgcacctcctcctccgccatcctgaccattgaacgctccatgctggtcaaccagctccgctcggaaaccaactacgggttccaggtgaacaattccgacaagaatgacaagctcggctgggcggcgggcatctggatgaacggcaacggaggaaccggaaccggcacgttcaacaaccgcattgaacccgccttcaactcccgggacaactgcttcgtcaccggcacgctcagctatgatacgtccaacgacgttttcctgaaaaaaagccgcctgtggctggattacgcccataacttcaccaactggggcgacgacgcacaaaacaaggcgtatgaaaagctcaccggctacggcttcaaatccaaataccagggcaccggcgccaaggacgtggtggcgctgacctgggaaggctcccagggggatttctccctgatgacggaagtgatggccggcttcaacgtcattggcatgaaggcaggggctgaaaacgtcttcggcgtgaccatcatgccgtcctacaaattcacccccaactgggaaggcgtggtccgctaccagatggcggcgggcagcaacgccgtgaaatgggaaaagcgctatacgcagaactctacctattccggcacttccgactgcatgcaggccctgtacctgggcgtcaactactacattttcgaatgcaatccgaacatggccaagatcatggcgggcgttgaatacgcccattccaacggcacggacgccagcaagcagaaaggcttcaccggctggagctacaacattgccttccgcaccaatttctaagaagttgagacgctaaaccacacattgggttcatggacaggatgggaggcatggagtaaaatccggcccatcctgcccatttcttttaaaatcacaaccgtgtgtccgggaacgtttccgatttcaatgtaatcagcttgggctgggctgtgtattcgcggccttttttcactaggccgccggcgctcacgaggccctggagcttttcataaatccgcagccgcaggatttcctcaccgcccagggacatgtgcttttgcttcatcacgataacggtacgctggaagatgtcattgaattccagcatgcccgcctcatgaagaatgataataagctcatcagtcaccaaatccggtgtcttgcgcgaggaacgtgatctcctatcctccagcatgatgatagaatactatcatgacacacttccaggcgtcaagttgataagacctgcgtcattttccggcagtatggggcggaaagggtataaaaggcgggtgtccggaaaccggatgaggaaatttcccggagcgggagatgtgttgttgattcgcccatccacgggatttactcacccggaggaaggaaagaagctctgcaagaaacgggggaaaggcatgcgtattatctgtaatccgggccgttcggaacaacaggccctaaatttcatttttgcaggtatgaatccggtcattttcagtccatgcgcagccgcggcggttcttctggctcctttttccctgtggggcggggaagccacgttcatgagttacaacgtaaagaacggtaccggcatggacggcaagcgggattatgaccgtacggcgcgggtgattgcggaggcaaaaccggatgtcgcggcccttcaggaactggacagcaagacaaaaaggagcggcggcagggacactttgcaggaattggccgtaaggacaaagttgacggggacgtacgccaaggccattgattattcgggcggttcctatggagtcggccttttatccagggagaagcctttgagcgtgaagcgaattcctttgcccggccgggaggaggcgcgcgtgctgctgatggccgagttcaaggattactgtttttgcgtcacgcatttgtccctgacgcgggaggatagcaacgcttccatcgacatgattgccgctctggccgcggagtgcaggaagccctttttcattgcgggagattttaatttgacgccgggctcggaaccgatagcccggatgaagaagcatttcattccgctgagcgatttttcccaaaaaacgttccctgccgatcaaccggcggaatgcattgattacatctggatgtacagggggagaaaggcggaggcgttcaaggtggcggaacgcagggtgattgaagagcctgccgcttccgaccaccgcccgatcaaggtgacggtgcgttattaatgcccttggctcattaattgacggcccgcggcgcatttacgccgcccaccagcagtacgatttcccccttgggggcacgttccgcaaattccgccgccagccgggaagccgggccgcggtggtaggtttcaaaggttttggtcagttccctggctacacaaacgggaacgtccgggtccagcgccgccagcgcctgcacggttttgacgatgcggtggggtgattcataaaagatactggtatgggaagcttccaccgccgcctggagcatggagcccttcctgccggatttgacgggcagaaagccgccgaagaagaaggcatccgtaggcagtccggaccccaccagggccgtcaccacggcagacggtccgggaagtacggtgaagcttacttccttttccttgagcgtctgaatgaggcggtagcccggatcactcacgcccggcatgcccgcatcactgatcacggcaaagctttccccgccggcggcacgggcggcaatttccccggcgcgggattgctcgttgtggtcgtgcatgctcatcaagggcttgcggatttcatagtgggagagcagaagcccggaatggcgggtgtcttcacacgcaatgacgtccaccttgcgcagcacgtccagcgcccgcagggtgacgtccgcccggttgccgatcggcaccggaacgaagtaaacgctgtattccacttccgccataagcacaaattttccggagccggacaggtctagccgttggtgagggtttccgcaatggaggtggctaccagccgcgccgcataggagagggcgttggtccgggccgtctggatgttgcccaggtcaaagaattggcccacttcctccgcagagctggcatacaggactttctgcgtcctggcgtccaccacccggtacttgacggccaggcgcaggcccagctccgtacttttgtaggtgtcttcccggctggaacgcaactggtcgaaggtgatggagtacacttctccttccacccggatatccgcatccgcaccggtgctgagccggtaggtgccgtcccgctgcagttcatccgccagcgcgccggtcaccagcgtggcggcgcggggttccagggagttgttggcaaagaggcagaccttgacggtctgcgcaaattccagcttgggcggcttggtgccgccgagctggtagccgcaggaaccggccagcaggcacagaacgggcagaagaagtttgaagacgttccggatacggttcatgcggacggagagttcctgttatctgctggtgacgcccagttttttcaggcgtgccttcgccttggcggcggcggcgggattgacgctgcccttggaggccacttcctggtagcagaagatggccgcatcggtgtctttcatcttggtcaggtagtattccgccacttccagctgctgggccaccagctcacgcttcatggcggccaggtcggaacgggcggccccggcgcgggagctgttggggtagcgctggaggtagtcttcatacgcttcctgggcgcgggccacattgacgtggttgcggtccccgtcagcggcggcctggcggtacagggtggctatctggagctgggccgtcggggccagcggagagtgcggatggttgtccaccaggttctgatacgcctcaatggcctccttcatctggccgcgggcggccaggtagctgcccagcacgttcattgcctgcggggcggtaggggcgtacggggcgttgtcacgcacgtggttcagccattccgtaacgttcttggggtccatccggacgtcaaacatccacagtacgcggttggtcaacgcgccgctcgccgcgccgaaggccatttccttctgccgcgccatggcctgtttgtacagggggctgtccgggtggcggtcaatgagcttctggtactggtcaaacgcatccgcgggttccttgcgggcctcatagagttccgccattctgaaccgggcctgcggcgcttccttggaaagggggtgcttttccaccacgcgcttgtatttcttgatggcgccggacaggtcgttcttcgcttccttcgccctggcttcctgcatcagggcgatggcctgctggtccaccatgcggacggttccggggggcgggggcgcttccgaagagcactggcacagcaccagtgttccggagacggcggccatcatgacaagcagctttttcacattcatgactttacagcagaaaaagagggcgcgtcaacccggtgaacgcagattgacgcgcaaaaaagagttagtgtcccttgccgtatacggcttcagcatcaaaaacgacgccgccgtccgcttcacgcagcgtgacgggttccccctggggctgggccttcagctcgtcgccgaagggcacggaacggtagaagcaggagtggtgcccggtgtggcaggctccggcgccgcactggtccaccagcacgatcagggcatcctggtcacagtcaatcaggatttgcttcactttctgcacgtggccgctggtcgcgcccttgtgccagatttcctggcggctgcgggagtagtaaacggcttcccccagctccatggtcatgcgcagggattccgcgttcatgtaggccagcatcagcggttcatgggtaacgtggtccatggcgagggccggaatcaggccgttctggtcaaatttgggggcgaattccgcgcctttttccacattcaccttgccgcggtcggcaaagacaatccgggatgagatgtcgttttgttccataaccggcccccttagtacatgaaatatccgacatataccaatcttttctgttgccctgacgcaacgaaatgttttcatagggagcgtatggcattcacggcatcccaagcgttcgacctgctccgcaccgccttctcccgcaaccggcttccccatgccctgctcattgtgggagacgagcaccagggagcctcccgcctgatccttcaattgctggagctgatgaacggcatccgggcggaccacctggacagcgtgcgggacgagtattgccgcctggtgcgccccaagtccaagtcgcgccgcatcctgcgggatgacatccgcgcggtggaacctttcctccagcagcgcgcggcggagggaaaatggaagatagccgtgttcatggatgcggagcgcatgaatgacgaggccgccaacgccttcctgaaaaccctggaggagccgcccagccagtgcctgctcattctgtccacctcccagccggaccagcttctccagaccattatttcccgctgcgtgcgcgtcaacctgctgcaatccgcggagttcaggctcacccccatccaggaggccctgctgccccactggctggagacctgccgcaatctggacaatgacctggccgcgctggccttccgcagcaagttcgtggacgtcatgacggaggccaaggccgccatcaccaaaaacctgaaccaggccctgaaggatgaagcgaaggaagccgcccagggcacggatacctccgactgggagtcccgcaacaaggacgcgaacaccgcccagatagagacggaatacctggaacagcgcaaccaggccctggaattgctcatcagctggttcggccaggcggccctgatcgcctccggcgctccggaggtcacgccgattcatccggaggtgcgcacgctgtccgcacagatgcccgtgaacgaattgctgaagcgcatggaagccctcaacaggctccgcgacgatttgaatttcaacattcatgaagccctggcgctggacgtccacctgctggccgccgtcgggtcttcctgaatgaagactccctcacctcccctaccccattatgacctactactcccgtctgctgttgtcagccgccgtcttcctcggctgttcgcccgccgtccgcgccgtcaccccggaagaagggaggcgcatctacctggaagcaaaggaagggaatgcggaatcccagtaccgtctgggcctctgcttcctgaagggagacggcgtcaagcgcagtccctcccaggccaaattctggttttccaaggcggccaggcaggggcaccgcacggcggaacgctccctgcgcctgattcccaaaaaggctccgctgcccgtggacccctccgccgaccgcgccacccgggagaagaaggggcttgaattgtatgaatacctgtacaagctgaaggattacaggcccgcgcgggagagcacaaccacctctgtcaccatcaacggcaagaggaagtatgacaagctgccggaagagggaacgaagccggagctttccaaagtcagcgctttcatccgcgccggggcggacgtgaattaccagggggagggcatcaggggggataattcctgcgcgctggccctggcgctggacatgcagttttttgaattggcggacctcctgattgccaacggggcggacgtcaatctggaaataggccggtccgacgagtataaaaacgcctcttcctcccttctttccaggcattatttcaatcccagggctccgcaggcagcctatctgctggagcacggggcggacccggattacgtgtgcaatgacggcaaaaccctgctgatttccgccgccaggtacgggaatgaggagagtgtcaggttcctgctggaaaacggtgcggaccccaacaaacccaacggtaagccgcggctaggccattacaagccggccaattcggaaacggccctgtgggtgctcgcggacgtttccggccttcaggaaaattccataaacgccgccgccaaattgttgattgagcacaaggcggacgtgaatttccgctccaggggcggggccactcccctggaccgcgccatcgccaccggaaagagcagcctggcgcgcatcctgaaagaagcgggggccaaaacctccagggaattagacggcaagtaaggcgctgaagctcagccttttttccctccctgccggagtcgggagaggatgacttcctcataggcgcggaatttctgctcatacgtcagccgcgccgccgccgggctggtggagggcatctggatgatggcaggggtttcccggaggaatagttccggaaaataccgcttgaggtatttatgggaggcggtgccgttgcagcagacggtgccgatgccggggaaacattccagcagggcggcaatgtcattgggctgttcctgggagatgtgctggtccaggctgccgggcctgacgccggaggccaccacgtcccacagccccaccccgccccggttgagcagggacaggcgttccccatacggcaaggaggggtcaaaatccagcagggttcccatgattttccagaaggcgttgcgcggatgggcgtaatactgggcctgccgcagggattcatcccccggcagggagccgagcaccagcacggagcattccggcgtgacggagggagggaaggagcatttcttcacggcgggaggaggtcacgggttctgcatgcctgagtatctgcgcacctccttgatgcccacctcctgccggagcagggaggagagccacggatggcttcccaccgccggagccaggttgaaccgctccggcctggtgatgcgcgtgaagatgacgcgcctgatttgggatttgggcactgtcttggctccgtagccgtccggcatgttggaggaccagaaggtgaccgtgtccccgccgtccttcaccagaacggtcaggtggccggattcccggcggccgatgtggtccgtccagaatattttcatgaagtctccgggacgggccttccgccagtcttcaaagttgacgccggctcccagcctgtgcaccagcacggccaggccgggaccgttggcgttcgcccagccccacggcccttcgccgtcatgctggcccaggcggggaatgagagccagccacgctcgctcggaaataacgggctgcggctgggcggcgtcccataattgcagggattttaaaaggagcaggtagcaggcggaggagcagaaggaaggggtggcctcccggagaaggaagacgggacggcgcgtgcgggggtcccagcggcaggttttctgcgccagggcttccatggcttccctgttggttttgtagcctccacccttccggaattgggaaagtccggcgcgcagggactggtaccatgcggcctcacccggagtcatggccgcaccccggcctgcgggggcgcgttccgccgccgtcacggctgccggccacagcagcccaaggcagcaaatcaatatcagggcattcctcatccttgccccacagggtatacgggcggcggaaaatatcaagggcggattgcgcgcgcagcgctgtacggaaagggaagaagaccatagccttttccccggaattcctgttgttttgtctggacttatcgcagaacgtcccttactgtgcgtcaggtcacgcgccgggtatgcggagcggagaggcaacgcaccttgggcggaccttgtttccggtatttatttttaaccaccacggaccacatagaggcatcataccatggcaaaacgcgaagacatccgcaaaatcctcatcatcggctcaggccccatcatcatcggccaggcctgcgagttcgactactccggcacccaggcctgcaaggccctgcgcgctgaaggctacgacgtcgttctggtgaactccaaccccgccaccatcatgacggaccccggcatggcggaccacacctacattgagcccctgaccgtggaccgcatcacggccgtgattaaaaaggaacgcccggatgctctgctgcccaacctcggcggccagacggccctgaacctggcctccaagctgaatgaggaaggcatcctgaagcagtacaacgtggaagtcatcggcgtggacctggaagccatcgcccgcggtgaagaccgtatcattttcaaggaaaccatggacaagatcggcgtgccggtggccaagtccgaacccgtctataccgtggaggaagcggagaaggtggccgccgagctgggctaccccgtcgtgctccgccccgcctacaccatgggcggcacgggcggcggcatcgtgtacaacgtggaggaactgcgccagatcgtcccccgcggcctggccgcctccctgatcaaccaggtgctggtggaggaatgcgtgctgggctgggaagaactggaactggaagtcgtgcgcgacgccaagggccagaagatcaccgtctgctttattgaaaacgtggaccccatgggcgtgcacaccggggacagcttctgcgtggcccccatgctgaccgttccccaggacgtgcaggacaggcttcaggattactcctaccgcattctggacgccattggcgtcacgggcggcacgaacgtgcagtttgcccacaaccgtgaggacaaccgcatcatcgtcattgaaatcaacccccgcacgtcccggtcctccgccctggcctccaaggccaccggcttccccatcgcctccgtctccaccaagctggcctccggcatcacgatggacgaacttccctactggcgcaagggctccctggaaaagtacgagccttacggcgactacgtagtcgtcaagttcgcccgctgggcctttgaaaagttccccaaggcagccgacaagctgggtacccagatgaaggccgtgggggaagtgatgagcatcggccagaacttcaaggaagccttccagaaggccgtgcgttccctggaaatcggccgcgccgggctgggccgcgtgaagaagctggaagccctcaccacgccggaactgcgtgaaaagatcacgtacggcaacagcgaacgcttcttccagatttacgaactcctgcgccgcggcgtgaccgtggaggaaatcgtgaagctgacccgcatcaccccgttcttcattgaacagatgaaggaactggcggactttgacttctccctggatggccagggctgggattccctgcccgtggaaaccctgcgccaggcgaagaagatgggcttctccgacaagtatctggcccagattttcaacgtgcctgaaaaggccgtccgcacccgccgccaggaaaacggcatcaccgccacctaccgcatcgtgcccgtcagcggcgtggaacacgcggaatattactattccacctacagcggcgcagaggatgaagtgcccgtgaacgacaagaagaagatcatgatcctgggcggcggtcccaaccgcatcggccagggcatcgagttcgactacacctgcgtgcacgccgctttcaccctgcgggacaacgggtatgaatccatcatggtgaactgcaacccggaaacggtctccacggactttgacacggccaacaagctgtactttgaacccgtgaccgtggaagacgtgctggctatttatgagaaggaaaagccggaaggcgtcatcgtccagttcggcggccagaccccgctcaacatcgcccaggccctcaaggacgccggggtgaagatcatgggcacccagccggaaggcatccgcctggcggaagaccgcgaatacttccgcgaacgcatgatcgccctgaatattctccagccggaaagcggcaccgcccgctccctggaagaagccgtggaactgggccgccagatcggctacccggtgatggtgcgcccctccttcgttctgggcggccgtggcatggaagtcatttacgatgaagaaaacctgaagcgctacggcgtggaggccatccaggtcagcccggaataccccatgctgatcgaccgcttcctggacaacgccattgaagcggaagtggacgcgctggccgacggcacggacaccttcgtggccaccgtgatggaacatattgagctggcgggcatccattccggagactccgcctgcgccattcctcccgtgaccatcgcccccaagcacgtccgcaccattgaggaacacgccgccaagatcgccaaggacttccaggtgaagggcattctgaacgtgcagttcgccatctgcgatgacgaggtgtacatcattgaagccaatccccgcgcctcccgcacggtgcccatcgtctccaaggtcacgggcatctccatggcgcgccacgccacggaaatcatgctgggcaagaagctcaaggacctgggcctgaagccgcgcgcctgccgcttcatcggcgtgaaggaagccgtcttcccgttcaacatgttcccggaagtggaccccgtcctggggccggaaatgcgcgccacgggggaagtcatgggcattgcggacaacttcggcatggcctactacaaggcccaggaagccgcaggctgcatcctgcccacctccggcaaggtgctcgtcaccgtctccgaccgcgacaagaagttcattgaacccatcgcccgggacctcatctccctgggcttcaagatcgtctccaccggaggcaccgcggaatacctgcgcggccagggcgtggaaacggaagtggtcaacaagctgcatgaaggccgcccgaacctgggcgacatgatcaccaacaagcagattgacctgatcattaatactccggtggaccgcaccagcatgattgacgactccttcatccgcatgcagtccatccagaagaagattccgtacatgaccaccatcgccgccgccagggccacggtggagggcatccgctccgcccagcatgtgaaggtatccccccgctccctccaggaatatcattcctgaacgcggacggctccagccatttaaaaggaatgccccgcatgcgtctcctgcatgcggggcatttaattatccgtccgggccggaggagggatgtgaaattcaaccagcgcctgtttccggccccttttcagccacaccgcctccggagaatcacgcttccgctatttccgcacagatcagcgtggcgttatcctggttgggcgcgccgtcacggttgatgccttccagcacggaccgcaccaattcctccgcggacagcatggacaagtaccgcatccccgccgggcccagggagtccagataaggccccactccgtcgctggcgaccagaaggcggtccccgggaaccagagggaagcactcttcccgcagatccaccaaaggcacttccctccccatcagggcggaggtcagggaatggcgggaaggatggctcaaggcctcctcccggctgatggaaccttcatccgccatgcgttccagctccgcggaatactggtgcaggtcattaagcagaaacattttttcctcccggatgagcagcagaagggaatctcccacgctgacccagcgcagcccttccggccctatccaggccgctaccagcgtcgtgcccatctcgtcatccttccccctcttcttccggaccgtacgcacctgttcattggcggcggtcactgcgtctttcatcctcttgccgggagaccggttttcccgctcaaacgcctgaaaaaaaccttctatagccgcgcggctggccagctcccctccggtatagccccccatgccgtccgccaggaccagcaccagggcgtcatccccggccaggatggaaaaggaatcctgctgattgctgcgggcgcccagaatctggtccccatgcaatccggaaaccataaaaggttcttgggaaaaaggctgctgcgtcatggcggtgagccatcgtagcacggcaggcccaccgggataaagcaagaataacgtgagagaagaagccatgtctgcatcccgggatgatttttccggagtcggaaaagcaaatatcaatgcggggccgtagaaatccggacgacacgtatcgcgaaatctcgttcgtcaacgggaagaacagggaactttacatggctcccaaagccctggattactcccagcttcatgaccttttttcccgctacgcggcaggggagaatctttcccgcctcaacagggagtggactcttgacgtgaacaaaacccgctatattcccaccatcattgttgttctggcaatcatcgccgtccttgccgccatcatctttcaatccatgaattgaaagaaagctttccttttttcattgccggacatttccgggatattccggcagaagggccgttgcggttccgggcttctgccggaagaacatcgcactggatggaggccaaggaaacaaccggcaaaggaacgcgtgaacatccttttccggatgcagtgcatgaacggtgcgtcctcagcaggcccctaaatacaccacggtttcattcggaaccgtaacacggcctcccgtctcaaaccggtcaaacagcccgttaagggcgtccagccagggggaatggccctcatccttttccgtcagggcataggaggcggacatcatgcggcggagatactggtcccgcgtataggacagatcattcggaaagcggaatacccggaagcggtggtcgaaaaactcgccgagtctatccgtcaagtcggccaagcccccgctgaatccataaaaacgcgggcagtaaagacgatggatgttcccttcctcccggacaatggggccgtcttccaccctggaatcccagatcagggctattctgccctccgcggccagaatacggcggcattcccgcttgaacgcggcggcgtcaaaccagtggaacgcctgcgccgccgttaccaggtccacggaagcgccgggaagcagggtatgctccgccgttcccggcacggaatggaagcggtggaaacccttcagcaccttctccgcctccctccgcatgtcatcgttaggctccacgccgtacacggtccagccatgctccaccatggcgcgggacaggatgcctgttccggaacctatatccgccattcggggattctcccggcgggtttcccgcgtcagaagctcaacaacggcggcgggataaccgggcctgccctgaacgtaggccccggcttttccggtaaatcggtcagtattattcatcgggctttgtgagatggtttactccttttctcccgtttttccagcttcaatgctgttcccggaacatgaaaagccgccgcaccgcgggatttcaggaaaaaggcataagagccgctcccgccgcctggcccgttgaaggcagccgggtgaataccttttcctgccgcttcctcatcctcccggcaaacgggcgggatgcagtccccactgatggctttacaagtctttcacgagcttttagtatccggatcaggcccgcttctcccggattgcgtcctgattacgggaaaacgaccatctgcgggctccattttccagactgcgccgcccatgttcggatattacagacttgcctccgccgtcccccagctccgcgtggctgatgtggattacaacgtcgaccagctcatggacggattccggaaggctgcggaacagaaagctgctgccgtcgtctttccggagctgagcatcacgggctactcctgcggagacctcttcttccagccgcgcctgcgggaggcggccctggacggcctgcgccgctttgcggaagcgacggaaggctcaggcaccattgccgtggcgggcctgcccttcctgcatgaagatgccctgtacaacacggcggcggtcatccagtccggcagagtgctggcgctgatccccaaaaccgtgctccccaactaccgggaattttacgaaaagcggcagtttacatccggcagggagctgggaacagggacgaaggaggccaaagtcaatggggcatatattccgttcggaacggaaatcatcttccacgatgcagcctcctccttcagcttcggcgtggaaatatgcgaagacctgtggagcgtcattccccccagctccggactggcccttcagggagccagggccatattcaacccctccgcgggaacggaactcacgggcaaggccgcctaccgtcgcgaactggtcaagcagcaaagcggcaggtgcctctgctcctatgtcctttcctccgcaggcgtgcatgaatccaccacggacaccgtattcggcgggcattccctcattgcggacaacggcaggctggcggctgaaggcgaacggttcggcagggaaagctccctcatccttgcggacgtggactttgaacggctggcggcggcgcgcctctccgaaagctccttcaatgacagcaaatccctttcccctgccggaaatgcccttcatctgacgctgccggcggaagttcccgccccccccggtctggaatacgcctttaatccggcgcggccatttctgccctcccccgcacaccgcccggaacggtgcgaagaaatcatcgccatccagacagcgggactggctaaaagaatggagcacaccgatgcacggcggcttgtcatcggcatctccggcggtctggactccacgctggccctgcttatttgcgagcgcgcctgccgggcgttgaaacgccccgcctccgacattctggccgtcacgatgccgggcttcggcaccacggacagaacccacgacaatgccttaaccatgtgccgccttctgggcgcggagcttcgggaaatccccatttccgaatgctgcctccggcacttcggcgacatcgggcacgaccccgccgaacgcactaccacctatgaaaacgtccaggcccgcgaacgcacgcaaatcctgatggacctggccaacaaaaccggggggctggtcgtgggaacgggagacctgtcggaaatagccctgggctggagcacctacaacggagaccacatgtccatgtacgcggtcaactgctccattccgaagacgctgatacggtgcctcattgaacacatcgccggagaatcgtccccggaactggccgccaccctcgcggacatcaacaacacccccgtcagcccggaacttctgcctccgtcaggcgacggctccattgaacagcgtacggaagacgtgctggggccttacgacctgcacgattttttcctcttccacttcatcaaatacggggcagagccggacaaaatcctgtatctggcggagcacgcctttcgcggcgaattccagccggacttcattcgccgctgcctgggcatcttcatccgccgcttcttccggcagcaattcaagcgcagctgcatgccggacggccccaaggtaggcaccattgccctttctccgcgaggagactggcgcatgccttccgacgcctgcggaacagtgtgggaaaaatatatttcccaccgttgaacccttctggagggctgctgcacgctgaccttctccggcgccccggcatgaattgccctacagggaagctcaatgcccgggggccagcttcaacccgataatgcctatcagcaggaaggtggccgccagcatgcgccagacattggaggaatccccgaaccacaggatgcccaccagaaacgttcccagcgcgccgatgcccgtccacaccgcataagcggtgccgatgggaatgctgcgctgggccagccacagaagaaaaccgctcagggccatgctgaacacggagaacgcaatgcaggcggcaaacctgccggaacccgtgccgggcgcctgtgaaagcttgaagcccagaggccatccgatctcacagagaccggccaacaccagataaatccaggacatatattgaaacggggaatcatcttccgtttgccggccctcccgaatgggaagagctccaagggcaacggatgccttgcagggtacccgtgcccgccccggaatcaagcagacaaaccatgcacacactgtcataccaggaatgctgaagaaacagtgaacacaaataaagaaaactcttaacattcataaactatttcctctcatccctgccagcgatcaggccgaaagtgcagggaatgaaacaacaggaatgggtgctgagaaagcctcaaaactggagaaaaaacctccatgatcattcttccgattacgatcacatcctccgaaaccgaatcagacgattcaaacttcttctatcttagaaaccgaggcaaatacagcatttgcacgaaaactattgcttcaggcgaaacggataccaacgacatgttcatggttgaataatccgcaacttcattcttctaacaaatacagtgcgagctcacaaaagctcgcactgtatatttattccttctataatcaaggatttacataagtttcaatccacgcacgcctatccatgcgactagccatatagtagctaaaacggtatcagatacaagcgaaaatcgaaaaaatattcttatgaaaatcattgataggttgactccatgaaaaaaatttcatagcctgaatccagttagagcaaaaaagctagaaagaatcccttcttcccagcttttcaggttcctacttccgccctacaaaggagacagcagcagcataaatatggaactctatgctatctttttttacgctgatgtcaactctggaggatagaagtggatttttagtagatagagtgatctatgaatgcaaaaaaacaaaaaaacaaaagaatgatagattgtcaaattaatctaaaaatatctcaccaggcattccgagatatcttcctcatgatatcactaatcatatcttccctatgatttggtgaacatgctgatttcccttggttgaaatttcaaccatcgagacattatgaaaacaagagaaaaatccagttcttgttttcataatgtctcgaattcctaccaccgttcctcccagagcttttcttacttcatccaacatctgcccattagaggcttctgcgttctgcaggaaaacttcttcatggcgacggaggcatacgggtggtctctgctacattttatagattttttaccagaagcaaggatttcaactcaaaaaactcttctctccacaattctgaagcttatattagaaacatggtctgtgggtatgaagagaaggagacttatagagcaaatacccggaaaattcgagaatcccgtcgcaagcttacgaacaaaacaggaccggcagattaactcccccggtctcggcaataatcaacaactaaaagcgggactattttattaccggagctttctgcccggtcggcagccccgtatcctttccgtcggtcagccactcaatcgtaatgggaacaaacttcagcttcttgatattcggctggttttcctcataaagcacccccacgacaccgggttctaccatggcgaggctggaataggcaaaacctccttctcccaacagttttttcaccggccaggttttgccgttgtcatagctcatcgccacctgccccttgatgcgccgtccggcactggggccggaaaacaggaggcggctcttgccgccaaaggcaggctgggccgtcagagaataagtcatcagggaattctgcgtgctgtcgcaaaacaattccggagcatcttccacttcaccccatgtcgcgccgccgtcctgtgaccacacgatgcggcggcaattgcctccgccccagtggcgcgcgaccatgaccacgcctccgttatccgtctccgcgatggacgtttcattcaccaggcccttcatattggcggtcggctggccctgcttccagcttttgccgccgtcatcactgtaaatgcaggaaatcacccatttgccgaacggcccttcattcatcggaatcaccaggcgccccttgtgggggccgctcttcaactgggttcccgcattcgggccggaagccatgatgtccacgccggtggggcgcttggtcgtcttcgtgatatcctccggcttcgtccaggaggaaccgccattcctgctctggatcatgaaattgcggatgcacttctcgtcatcccaaccctgaggaatattgggctgccgttccttgactcctgcgggataacgctggaatacgacggtcacggtcttggtcttggcatcataaaccgggcacggattgttaaacgtggccccatgcgacttggcgatcgcccgggggcgtgaccaggtttttccgccattcttgctgacgctcatgataatgtcgttctccccctggtcagtattcttataccggccttcggcaaacgccaaaagctgccccttcccgatattgagcaaggcgggaatgcggatggacgcataagggttcccttccccagcgctgaatacggtcaccgccttgtccgtgggaaaatccgtcttctctccctgcccgaaggcgggcagaactgcggcgcacaccgcacccatcaaaaacttgaacatggaattcatcattactggactttatcttgttccgaagggctctacaaccgcaatccatgccgtaccatcctaagaccagagcagaaactctgactctctccaaaggaatggataaaccatgctgaaggagtgagaaaccaaaaaaatctggcagtcacatgaaaatctacctggactccgtcttgttcatcccattccgggaatccaagggatagtcgaaaaacggacaccaattgtccatgcggtaaacgacgtcctgaatccgggtctttaccttctccccctgggaatcccgcaggcatccgcgcgctccggtgcgcgggccggaaggaagtttctccttcaaggtcattccgtaccggagatgacagccggaagggtcggacgacattatgatgcggacggcgtctctgccgttcagcgtgacggacttgatctccaggggttcgccctgcgcgttcaccagggaaaagccgtaattgcccggatcaaggatcgtcttggtatccagcgccagcggaggcacaggcacgaaaaacttcacgtctaccgtccagtccttccccttcctgccaactgcatgggcgacaggatggatgggcttccaatgcacgccctccaccagcaccttgtacatgacgtatccggcatactccccgtaaagccgggacatgggagcggtcaaatgcaccccgtcgctataggaaaaatggtacatgggcgtagtcatgatgtaccggctgtccttttccagagccaaatccagctgggccacggcaatcgcgggataatccgtcggattctgggcaaaataattgagatgggaggcaacctggtatccaaagcagagcacatcgttcttctgtccggtaacggccttggcgtccgcgtcaatatcctgaatcagcgcgcgcatcttctccttgtaccattccccggttttcctgtcctgctggtcggtttccccctgcgtccacaggaaacaaggcatggaaaatgacttgccggccttggaggcgagctcgcgccccgctgtcaaatcatccagaatacgctgatagggggcgttgcctttggaaagaacaccgatgctgacacctcccacgccgtcggcagagcacaggaaccggacgttggacgccttcccggagtcacgcttcttcagcaggcgcatgaaattcccggcagcgccggaaacgggcgtctctcccctggcgccgtccggagaaatgccttctaccaggggaatcacggcgctccggtcattgccgccctcaaaaggacgaacgccgcctttgaacatcaaattgccgttcttctgctccgtcgtcaccaccggcttggccgtccatcctacggaaagcgactgcccgtaggacggcaaataattccagtctgttaaaacgggcttctccgcaaaaccataaggactgccagccatcaacaggcaaaaaagaactccggtacgaaaacatgtgcttaccttcatgacaatacgctgaatcatggtcatgtacggtccggtacctatcgaaaattcaacatgctgaagaaaataaccggggaatgaatgaaacttcctcctgcccaaaaacactacacatgaaaatgttgaatatcattcaacagacatgacgcccgtagctgccccattgatgaacatggaaattccgggcagccatccgttttaccatgatgatttctctcccatggattctcccggaaaataacgcctttttgcaacctggtccatccgggaaactgtggaccgttaataagattcagcccattcaaccatacctggacctctaaaacccctcttcttcaccgtgaagacaagcaagctaatcaatgaccagttttttcaggacttccttatcttcatccagcactaccgttctggatgcatgttcatagcattggcgggaatacttgcgggcttcctccttgaactgcccgttatccaggccatgcaatgcggcaaaagccttcaacaacttgatgtcaatcgccataatccctccttcgtcgcgcagaatagggctgaaaatatccgaaaacaaattggagacggtcaacggaagcacccatatcctctcgtgcttcacgccgggacggcgttcttcccgggcatacttcgtcagcagccgcacgccccggttaataatatcaatacccgttccgtaatcattgacggctgcagacagggccctggcagcaatctcggcaagcacgcacaatccaaacctggggtcctgttcaaaattgcgctcatgcccgatgataaacgctccaagcaaatcacgccgggtttcatttgacacaggcttgtcagcataaaccagaaccgaggtaacggacacgaaatcccccgggagcgagacgacgtaaagatcaagatctctatccctggaaagatggtccagcttttcaatatcaatatattgaatattgcctgtctgatcactcctgacgggaacggcattttccggaatatcaagctccctatcaacgaggggattggcgcccagatagggttcccgggcgcgttccagcaatgccctttccgttactccctccaccagctcggaagtctctcccacccggccaagcctggacaaatgctcaatccaccggatgagcgtgaccagaataatggcaatcacccccagggtgacaacaaacagaaccacccttccccgctggtcatacatgccggaattcaggaaaataatcgcaatcaggctgaaaatgaaggaaccgatgaatgtggaaagagcattctgggccgtggaatcctccatcagcagcttcgtagccctgggcgttacgctcgacgtcgccgctgcataagcggaaacaaccgtggttaaggaaaaagtcgtaaccgccagcatgcttgaagccaggatattcaaaattgtatcgaccgtatcggccccgatcttttgaaaaatatcaaacggaacaaactcgcccaggtaaatggaggcaatagccgtaacaatagccagcagcgcaaaataggtagccttgacccaaagaagcttgttagccctcaaaaacaataacctgatttgaaaaatgaaggaccctttcatcagaagctggaattggaaaaacggttggaggctactctcctgttaaaacagtatcgaagcctctccgttcaagaataagactcttaaaggagggtgagaagccgatcatttctataactttaatgtctctcgaagtggaaccccgcatccgggaaaccgcaggaaatggtttctgaaactggaaaaggagttcactcaagtcaagcaactcaaaacagcgcccatccttccgaaaagagcgactttgcttcaaggaatggctgtggaaagcaaggttcccggctgtgccggactctctctgtacgggcaaacccaaaaacacaggcagaatctacctgtaaatgctcatagaaacctatggatccgttgcctccgctttctctacatggagaaacgcctcgatcaggcagccctcatcctgaacaacaacgtgctgttcttctatcagcaacacggatggcacataaaagccattctgacggatgacaggaagagaatattgcggggaggcgcgtggtagaaattctatgccgatgtcgaagaatttcagaaggactcaatcaaatggctcaagggttacagtcgcaaacgccctcataggactaccgcagtatgggaaggcaattgagtaaaacatggaagccttaaaaaacacgccatacgaaaagaaaaccagctatacaacgtgagagcgttcccattcatcaacccgccccgtcttccgttgaagcaggttgattttttcgtttgccggtaaaaagagaaatggtgaaagaagaggaaaacggagaatgtaacttgtaacatcatagaatcacccactcccacgttatcatgaaccgaatcatttcattcctctccctgcccctgtcgccgctcgcatccgtacttgcggccaacactccggaaagcatcggcaacgacctccaactattcaaggatgcctcctgcacggctttgaagcagcatgttaaagacatttccgccttccagcctgacgcgatgaaggaactcgcgggcaaaatcctggcaggcaactacaagccggactacctgtatgccgaataccaggccctcccctcaccgcgccagacgggcaaaaaccttagaatcggagagggattcagtaaatacgacaacatgacgggcgtctatctggaaaaagggcagcacgtcgtgctggtcggcaagacggatgggcgtgaaatcagtcttctgctcccgaacctgatgcgcaagccggccgaaggagtgcagccgacgaaggatcccaacggctggggactgcacaaaaagcaaataccccttaaggaaggaatcaacatcattgatgtagaaacgcccgccaacgcctacatcagctacttcagcaacgatgccgacacggcaccgaaaatccccgtccatttcgtgacgggcaaagtcaacggctatttcgacaccacccggggcgataccaacgaagactgggtacgcctgcttgaccaggccgtctccccgatcatggacgcccggggaaaatacatccaggttgcctaccccgtcgaattcctgaaaaaattcaccagggaccgcggcactgaactcatcaacgcctacgacaagctgataggcatccaataccagctgatgggccttgagaaatacggcaaaatcccgaaaaaccgcgtctttgcccgcgtgaacttcaactactacatgttccgcgacggtgatggagtagcctacctgggagacaatggtacgatgcgaatggtgaccgatcctgaaaacgtcctcaaaggcgacgcctgttggggcttctcccacgaagtcggccacgtgatgcaaatgcgcccgatgacctggggcggcatgacggaagtcagcaacaacatcttctctcttcaagccgccgccaaaacgggcaacgaaagccgcttgaaacgccagggcagctacgacaaggcgcgcaaggaaatcatcgatgggaaaattgcctacctgcaatcaaaggacgttttcaacaagctggtccccctgtggcagctccatctctactttaccgaaaacggacatcccgacttctaccctgacgtcatggaatacctgcgcaacaacgcaggaaactacggagggaatgataccattaaataccagttcgaattcatcagggcatgctgtgacgtcacaaaaaccgacctgaccgacttcttcgagaaatggggcttcttcgaaaccggacaattccacatcggcgactatgccaattacgatttcaccgtcacccccgaaatggtggctgaaacgaaaaaatggattgccgataaaggtttcccgaaacccgaaactgacatcactgcaataagcgaataaagttattagggaaacctacttattcctcataaaagtcatgatatgtctgtccctcagtaaaaaatggaaaccttttctccattaggaactgtatcaattggaaaaagcggaaagtccatttagtcatttgtaaggcaaaattattttttacggtaattttccagatttgagtatgcttatcctcatcattcctctggaatccttacaaatgattctggaaatattgagaataaaataaccggattatcgacattagccatttgcatttactggaatactaagacctccaatggctttgatacatcggatgggaagaggctttaaaattgctgaaaatcagaaaacaaaattcaaaaatatattaaaatgagcaagttatgaatattttggtcttgctcaatgtatattaaaataaatggagatgttttaatgtatacctcagtatccttggaattcattgcccaaaaatagtattaaaaattataaatatatgtaaatgaatacgttacaacaaaagcggtcttactcaatggaagaaatgggatatggagggacttcagctcaatataccttgcagctgatcccctgaaagcattcccaaggtcaatcggttttgtacggaagcattttcaaaaaatgatttggaggaatcctaatctagaagaagcacataaatggggtgaatacatggaagataggtatgtgtttactccatgggaaggatttagaaaagaaagtggatcatcatatggaatgatcctttatatatcgctcgacgcttaatctaattttttcagtttgcactggagaaagattcttttgcgcttctataatatccttaattgcgtattcgatataattaataactaatggcgaagtttgaaccattgtgttccatttaaatattccacctgtagattttgttacaagacttttccattggctaggatttgaatcaatgagagtagcaataacaaagcattctcccaattttgttatgagatatgcttcagagtcatctttagcaaaaatcgtattcgcatcagttgcagttaagagataaaaattaaaaagtccattattgtattttaaaaaaagagattctgtttcagtttgaattggtagaattaaaaaatattgcctatacaatccaatattttttcgtttgttcagtaaaaaatccttccaaatacccttagcttctcgcatgtttttgacacataatttagaatgatcatctaccccttcattttccaatttgttaactaatgatctatatgatattgaaaccaaaaatttcaaaaaccattcatcataattaaaagaaaatgtatttttttgagatgcataataaggatgaaaaacattctcagcaaatttcttttcccatacggaaaatagatcttcgcaatttgggcaaagtaatgggtatttttctccatcttgaactcttctattaggatttaatgtcgttcttgaaaatccagaaggagaaagttgtcgtaattttttatatacgaaagcgggaataatatggcttatttcttgcctttcgtattctctacaaagagcacataacatgtcagtacaaaaatcgattaataaatgaactcactcaatgtataattaaggaagattaaagcaataggaaatatgggatcggtagtcaagcattggccatatatcaatgtaaaaatatcatagatttccaatataagggtaggctattttgtacgagtaggaaatagtccatatcgaccttgctgaatgtttttactaaacattgtgcttgtttccatttctttaacgtaatcaggaggattcacattttctataataattatttgcctatcgtcccaattggataagtatttatagaaattctcttgaacatcagtttccgacaaatcatcattttcatcttcgggttcacgataagcgagtagtggcgaatctaatatcaaaaatccgggatgagacaattcgttttctttacaaaattccaaaagaccaatactaaatgctgcatgagtgatagatctcatgccctttccgcgagcacctcgatgtttaccagaaataactaaatctcgcgtcttctcatcaaagaagactctatcggaatctggaaaattccaagtttttaatattgcttctatttttttggcaaaatcatctaaagtagaagaagataatttaattggttctttttcaacaggtatttcaataggttgttctttacccaaaatttcttttcttaatgttaattcatgtatgcgttctagtactttcaatgaacttagtatatttgcacgagaatttaacaaatcagaataacagacaccatgttcggaaatactagatgctacctcttgtatttttctatcaaaaataaaaatctctttttcgatttttggcaataactcatcaaaatttttattttctgctttaagttgacttaaagtatgattaagttcatttttgagtttggatattttttcactttctacggaaacagcagttacgacagatgataaattcccgtcacatttttcatttaaatgctgattctcaggcaatgaaccacatagagggcatgaagagttttcaagagaacccacaagaaatcctacttctctgataccttctaaacgttcaaggtcagaagtatagtgttggtctaataatgtaaacctagctattagttcaccaatttcaagatgtctgtcacttccattttgaaatttatttcgcaaatcattgcgctttattattaatttattgtattcttcttcggtagaatttagagaattttgatgcttagatattgttttttctaatcgttgaagttgatctttaagttcggtttcttcttgtattttttcaccaaattgtttttgcaattcattgattaattcatcaaataattctatttttacaatatttccttgaatatttttttctgaaggaagagaaatgaatgctctatcatcaattcctgtaagtaacaatttaaaaattgaatactctgttgttctaagtgtaacttgacctccttctataggagacctttgtttctgtatattttgttcgtcaactaaacatagatgacataaatttctaaaactcagagatttagttgtcccttggttattggattttatataattattgttaaaatttatcttctccagcagaaatgttgaaatattgttcgtatttttttcattatgcttcgaggtcaaagtaaggctactttcttcatcttctggatcaacttcatgtaacccatcaaatactaaaaattgtcctccatctgtactcctgataagagtgaatttttttcttgatggtattatttctatacctagtaaaattttattatagccaactctttcaggaatatcgcggagctcttttgctccaagcatataattgatggcttcaagggcaaacgattttcctgtttcggatgcgccataaagaacatttaatcctttttcaaaatgaagttttgcagattctcgattaggacctgtaaatatcaaatgtcgaattattaatgcctgtttttccattattttacttctaaactttgttgaacatcttgaaattcttcgacccaatgattaaaaaattctcgaatgattttttttaaatgatcgtagttcatatatccaaagtgatttataacccaaatagaacgtttttttagttccaacaaatatggagaagtcagacacaacataaaagtctcagccatttctcctgcttgatataaaataccttctgagcaagcttgtcgaacaacaagcttcctgctcatcataagaagaagtccattttctactaattttcggcgtaccaacaattctgttgatcgtaaagggatttgagggtgcaaactctctggtccattaatatctcccgtatgtacgactaagtaatcaaaaacaacaagttgttgtatatcaaaacattttggataagacgcgactagtaagcctacagatctaattcctgcttctaatggactattaaatgttaaacattcatgggcttcatttttcatttctgcctccattctaatctattatcattagcaagttggtgacaaattccttttctgtcctgcacttttattacgcttataagtgcatttgacgtaagttgtaatgaggatgccgcttgtaaaactgctccgagacgagaaaaactattgttgtgcgtgaaatcatgaatatcaataactcctgcataaacttcagtttgtaaatcttcgtatgtccctggaggtacattatctctggcgaaattccgcaacgattcagcgtgataaaaaaactctcgttgtcgactaaaatgttttaataagtcaggatatgtctctaagtggcatttttcgctaattctagccttagttttttcttcataaacttcatataattgctgaatgtaatgactttcattactttggagagactcaggaggttctatggctggtggtcgaggttgcaatcctcctccaaatcgtgcagcgtgatattgtgtaaacttatgatcatcaattatttcgagcagtgttttatgtgaaaaaatagagaaatcaaaattttctacatattttttaaactcgccctctaaattaattttacggatgtttgttattttttctgcgcaacatttatcccattcatttattgtttttgttgctagagcaactctgtcgcctaataatcttactaaactcattccgcagccttttggagcaataaaataatgatatcttggtgctctaaaatcacctgaatacgaataccatagtattttgcctatttctattattgccgttgcaggggtcaaggcgtctttatagtgtttgcattggaaattatcccaaactccatgtaatccttctttgtctgtatatccagctacgtcaattcccttatcatttgggcctgacatacgtaagacctgaagatacttcgacctttgactattaacccattcatgcacgaaatcctcccaatcagaaaaattatagagcaaaatctgttgttgagcagggatcactttcccaaactggacgtgcacaggactcacgctttgcagatttggagcaggaatctctttcatatttttgggtgctgccgatttctataaatgtatgatgcatttatgcatactctaattgctaggataataaaagatccaaacaagcggataagcaagataattcatattatttcccccatttcttccccatgctcctacaaacaaaaaccgcaacatattggcatgcaatatattgcggtagaaaattaatggcgaacagggagggattattttaattgatagtcaattgcatatcataaatatgtaccctaaagtgtaccccttgaggcgttttttatcgaatcaaatggcgattgaaatgacccgcaacacagtggaataatagattccccaaagaggtttgtccaatgaaactcgccccaaattgaagacaatgagtactccatttggatgcaaagtatttttcattcaataatcttttagacaatagggattatctttgcaaatgcattattggtaatatgttatgtgtctattctaatgtctttctcctgtcgtattgtcttcttttctggataaagagcaattgggtgtattaacccgttatatgaagatggcggaaccattatccgctgattcccggcctctgtatgcaatgcgcgcagaggtcttttcgtcatcaaccatcaacatattaaatcatcatggctatcaaactcatcgccaactacagcaaacgcctcggcctaccggggtattcttcccatcagttcgaagtctccattgaaacggagatcggaaacacctctgaactcgatttcgccgcagaacgcctctacagctcgctccagtctgctgtggatgcccagatcaagcaggttggatttgttcctgatgcttcctatggctcgagatgcgtatccggtacgtcgcttcctgccatgcgtcaggctccacggcttcctgttcaatcgtcttcgaattccaaggcatctcaccccgaagaaccggcatggcattgttcagataaacagaagcaggtcatactttctctggcccgcaaaaacgggatcaatgattcagctctccatgatctggctgtactttgtttcagcaagggcgtttcccagctgaataagctggaagcctccactcttatcaacgagctgatcgcaaaatctggaaaggcatccggcaaggattcctacacagagaactatgctcatcgtcaactcgctccagtctcaagaaaacagtcaccattctgataccatgagaactctcattctgctctttccgtatacttgtggggagaatgttgtctggcctgagtatattgctccatctgtatccaagtcctattttggaaggggcaacaggatttggaaacctgtgggtatcgctccatagctctgctcattgaatcatgttgcgctatccctcagccggggtagcgcaacgatgttttctttagctgtcagattttattctacagcttggagatcagtctctccataacatgttcaaacgcatgggctggatcatagtccgtatcgggacgtaaaatggcttccgtatctccaagaaacacagggtcggacatcttctgctcaaggttcattacaaattccttttgcgaaggagatctgtcgactacgaattccatataggtgcgaaaacacgaaagaatgcgatctgcatgagttgttccttcggaaagagcccggtgcagatcgaataggtcacgtccttttcgcctttgataaagtgctctcattttggtgccgagcagttcatccagttcataagtggtaatgcggcactcgccggaaaaccaatcattgttcatgcggaacggaagatgtacccaatccagctgatgaaagtgctcacggcaattgatttccaccttcagccgaataggcatgatagggagaatctctgattccagcctgtagacaagggtattgttatggctggctctttttgttttaggttcacccagaaaggccagagcttcacggaggtggtccaaaatcggcttgatggggccggcatggatctgaaccaaatcaatgtcttcggaataccggggctggggcgacagatacaatttatgaagagccgttccacctctaaaagccagatgctctgcaagaaatggatctgagaaaatggcaatcaaggcacggcatatgatcatgtcctgttcgacaagttcattccggggccatggtgcttgtgatgcccatgatcggacaaagtattcgggaatcatgagaggtcgctttcctgagtttcgttgatgataagtttccagcgtttatctgctgttcctgttttgacagggctttccaaagacaaaagggatttttgcaaaggctggcgatgagtttccaaaaatgcgtacaggctacggctttgttctttatcccccagaaggacttctatcatatagccgagtcgttgaaaacaaggcagaggtacgcacgataggatactgcccggcatatgatcgaaatggcaggcttccaaaagttcttccagtaccgtcaacacacgggagagtcctccaatgcgcccggcatattgaaccaacgtcaaggccgtgaattccggagaagaaacttgaatgtatccggaaggagttttgaactccttgagcagttcaggagggataccttgactgaactcccgctttcccacgaactccaatcgtgtgccatgttgggttctggaccggggaacgggtatggtcgtcatgacagcaaaagtttggggactctgatgagcggctccgtagaatgctgcagcattgagcagcgcaacacaataggaacgttccaaatacttcatcaatgcgtccaaatacatggtgacaggcaatgtcccctgtttgacgtaagcagggggaagaatgagataaaatccctgccaggcgatagaaatgaggcgagtttcccgggcacgcaacagcccaactgccactgtctgtttagacgtatcgggtagtgctttcagtatctcttcacgagtaaaaaacaggcgaccttgagttgcctgttcctgtatccaggatctgacggtaaatccttccatttcgttatttgattgcgtaaatatacacaaacagtatatttatgcaatcattttatgatattgatcttctcttgagacaaacattccatcgtgatccggaagtgtgatctgatgccaataggagcaaaagtacacacaagcagtcacagagtgtgtgcttttgatacaaagccctgataacggcaattattgaccgctacccgttatataaacctgaagacaggcctttaacttctgacttcattactcaacacccgtttcccattcgcaggggagcgggtgttttcgtttcaacccatatttcatcattaatatgaatcctatcatcgcattgccgcaccatccggtagcagcccggaatatcctgcctttggaagataccagacaggcagcccacctccagcggagaaacatcatgccggaaccggcagcggctccggttattcccccgaccgtattccgcaaagggcttctcctccactgcggggccgaggtcgtcgacaggagaaccctgtcccgtgtggagaccccgtcctgcacggaatcatggttcccgcttccccatgattttctgctgaaggaagtggaatcccagcttaccgcccacggcttcggcatcggggaaaccacccacgccctcagtcatgaaggaaaacggtatttcggcgtcctccaaatcctgcagcctgacgacggccctggcgactactcgtggattgtcggcatccgcaactcccacgacaaaaccttcccggcctctctggtcatgggaacgcgcgtgttcgtctgcgacaacctcgcgttcaacggagaagtgaaactctcccgaaaacatacgaggttcgccgtacgggatctgcgcttcatgacctcccgggctgtcggacggcttggggaacaattccatcgtgaagacgaacggattgccgcctacaaaaaacagagactgaccgacaaggccgcgcatgatcttctgatccgcgcggtcgactgccgggccattacgccgaccgtcctgccggaagtcatccggtactggcgggagccgcttcatgaagaattccgatcccgtaccgtctggagcctgttcaacgcctttacggagcagttcaaggccgtcaacccgcatgtggtcgccaaacggagccaggccctgcacggtctgtgcgattccgtctgcggtttgatctcctgagcacggttcaaaaatgacaacagaaaaggaaacatctcatgaatccatcctactcattgacgggagcgcaagccgcagtcctgattctcacgcaatccgtatccggacaaacgagcgatgaactgattggctccttccactcggaagagcggggaagagtcaggcaaatcattcgcctgctggaacgccgtggactactcatctgccaaacgggggaagacgatcccttcgtcttcccccgcacctggcatcccacctgggacgggcgaatagccctgctggaatgggccgcctatctgggcaacatccggctggccggcaggaatgctgcggcatcaaccggttcccggacagtcatggaacagaaagatcatcatcacccctcatccgtatgctgacctttctcctcgtgactgtcgcaggctggttcctgtttccgtggctgttcactctcctcaaatggggaatcgtgctggccttcggcttgatgacggcaggactgcttctgtggttctgcctcttttgaagagacatccatccagacaccggaaccatgtaccacatcgtcaaatacaaggacacgcgctactgggcggtactccatcacaatgggaaactgctcgccgtcgtcgtgtacaaaaaaggcgccgaggccattgtccaggctttggaacaaatcatcatcgacgccgtcaccaaaccacaaccaccatgcccatgataaaaatcatcctgttcgagctcacccgcatcctgctgggctacgcctccgacaaggtaggcgagttcattcggaacaagcagaggaacggccctcgtcctccttccctttacgaggaagaggcggaagatccctggtctcaacctccaccccgctgattccatgatcctcgcgcaattactccaagccatttacaatctcatcgcccggcggtgagacatgccttccaagacgacatgttgtctaaggaaggcgttcaagaggttgtccaatcgactcctcttttttatctaaaataaatcacaactgaattataatgaaataattatgaaatacaaaagcaatactcttgaaaaggcaaaatcaatgtagtaatgtaacccgaaaatggaaagacttccttttactgtttctgctcgtacagccaggcttatcggccgagagaatgttgcgtccgctcgcggtgccataattgaattggtcaaaaattcttatgatgctgattcaaaaaaatgcttaatcatatttgatatacctttgacaaatgagacgaaaatcctttcttgcgaaaaatggaatatagtattaacacgcgtagagcaaacaggattgtctaaagaagaattaaattcttattttgaagttaattttaatgtggctaagaaacgagcaaatttaacagcacaacaagatcttgattataataatttttgcaaaaaattgtcaagtatatatattattgacaatggagaaggaatgtcttcagatgttgtaaaagatcattggatggtcattggcactcaaaataagttaattaatttcaaaagtaatattaaagatagaattaaatctggagctaaaggcattgggcgttttgctttagatcgtttgggagagcaatgtgaaatgatatcattcacaaaaaagaaacatcttcaagctattaaatggactgttaattggaatgagtttgatggtgaaggcaaaaaaattgaagatgtttcagcaatattagaaaatattaacgattctaattattttgaatgtttacttcaacattatcctgccctttcaaaaagatcattagaaaacctctctgaaatgtctactggtacttgtttgcgcattacacaattgcgagatgattggttttccaaagacataactaacctttttaacgaccttgtcattcttactccaccgttggggaacgaggaattttctattattttcgagcatatccaacaaccccatgaatatggaaaagttttgagcagtatatgtgatgattttgattataaattgagagctgatgttaatgttgatggaaagctcaatttgcatataattcggcgagaatatgatgtaaataaaataccggatgatttttttgaacgtgggaaaatgaaaaaattcccatatcgacgttcagaattttctgataaaggttttgctttgacaaagtctattttcacccttcttccgggcatgccccatgagcaaattgctaagttagggcctttttcattaactctttactacctaaaacgctcggttcgccctaaggacatttcattgtacttttatcgtaatatcaattatcagagcggccaacgtcaacaatggcttgaaacattcaaaggtatcaaaattttcagagacaactttcgggttcgtccctatggtgacccccgagaatcagcttttgactggttatctttaggaccaagaaaagctaaaagcccggcaggcgttgggagaaatttaggtggttatcgaatggaagttaataaccttagtggggttattgaaatatctcgccttcttaatccatgttttgaagataagtccagccgtgaaggtttgcaggaaggagatgcatttaatctttttaaaatgttaattattgagattattgcagaattagaaaaggatcgttctacaatagtcaaagagcttaaatcttactcaaaagagcaatcaaaaataaatataccagaagaaattaaaacaggagaacgtcttgtcgaagaattaactaacagcgaaaccctattagatccacaagacttagatcctaaagtgattgccatggcaaaatatgctcggcaacaaagagataaagttctagaattggaaagaactattcgggaagaacaaagcctgcttagggctatggcaagtaatggtttagttatggctactttcggacatgattttagtcaacagttagctattcaagaaacccgtatgctaaggttgaaaaaaacgctagaacgtcacctcaaagaagaggatctacttcaaaaaggatgccaagattcactcaatccattccgaatgatagaagattataaggatgacgatcgaaaaattgcagcatggatagatttcgctaaaagagttgctcgtaaagacaaacgaaatcgcaaacaaatttcacttaaaaattattttctaaaattacaaaaaaattgggaaccatttctttcagttaaaggcattgctctttcttgtgatactcctgaaaatgtattcattcaaagtttagaaattgatttagatagtatatttaataaccttataattaattctatagatgcattttctttgtctactaataaacgagaaatttttattaaatgtacaattgaagataatcctaaagtaataaaatttacatatcgtgataatgggccggggctttcattggatttaaatcctcctgaaattatttttgatcctttaataactactaaaagagacgtgaagacaggagagcccatagggactggattggggatgtggattgttaaaacgataattcataattacggaggagaaatttctttaaatagaaatttaaaaggattctgtatgtattttactatgctttattagttttatgtataagttgctttatatagatgaggaaaaaagagcatggagagaaattggaaatgctctatcacttagtgattttgaaatgaaattcgattttattccgatctaccctcgacttaatcttgatgatatgattaatgaaattatagagggagattatgatgccgttattactgattttatgctaaataataatacatgtgatatgagttatcaggttgattatacaggagaagatattgttagagcgtacaaaaaaagatgctgcttaattcctttttttgttttgactgcttgggccgaaaatgcgacttcggaagcagatgatattaaccatgtatatactaaatctcaggtattacaagaatgctatagtgatactgtttgtttttgggatagagtatataaacaaatagaaactcgcaaaagattgattagagaagcagaagagcgttataaatacataatttccaaaatagaaaatggggatcgcttgaattctcaagaaacttctcaatttctacaggatgattcctttctagaagaagtttatgggggaaaatctaatagaattcctaatcaatataaatcagaatcatatttaaataaattaagttgttccttggaaaaattagaaaatattgttaatgaattaaaaaaatcttaatcatgtattataatttccgagatccatattatgcaccctcccgtggataccgaggcctacctaaatcccattatcgtgcatacaaagatcagttaagagaagattttaaaaaacgttgtggatataccttttgcagtgatggttggtttggaggaccttcttgcttccatattgatcatttaaaatctaaaaaatattacaaagatttgattcatacatatgaaaatctagtttattgttgcgcgagtgttaatattgctaaaagtgatgatcattcttgtgaatatcttgatccatgtgatattgactttaacaaggattttgcccgcaattgttttgggagaataataatacgttctgatgctccgcatcaaaaaatagctcagcatatgtacgaacgaatgaaactttatttaacaaaatatgcacttatttggtggctagatcgtcttacaattcttgtaaatgaagctcggcaactcaaaaaacagtatcctgataatatcgatcttaaaaatgctttagatgaagtgatagaggcatactatgatatgactgaatttttaagggtttcctaggatgagtatacaaaaatctaaaggagcttactatacatctccgcaaatggtacgacttttgaaaagtcgtatcgaagatattctagagaataaaaatgatcttattattttagaacctagtgcaggagagggagcctttattaaagaaattattgaacatccttgcttttctcaaaaatggcatatcgatgcagtggatattgatcatcgggctatctctttactgcaaaaaagttacccacacgtttattgttataatgaagactttattgattattcggtagattgtgttcgtagatatgatcttattattggtaatcctccttatattaaaaagaacttatatatgaaggggcagcacgaaaaaattgtcaaatattttagagaaaataattatgattttaaaggggttactaatctatgggctttttttgtcattgccagtactcagttattaaatgattctggtgtgttagcttttgttattcctacagaatttcttgccgttaaatatgctgaagatattcgttaccatttgcttaagctattttcctcaattgaatttattactttcgaagatcttatgtttgatacctgtaaagggcaagataccatgttactcgtttgtaggaaacagtctgtcaaacgtggtgttttcttcactactataccaaatgcttcttcccaaaacgttgtttccttgcaacaactccagcgtgtagaagaaagtaaatggagccattatttgctatctgcagaagaaatagattacttgcatcgcatttctcaagattgttttcctctttcaaaatacctttcatctgcccctggagttgtaacagcagcaaatagtttttttatcgtagatgataatactatccaagaatacgatcttcacgattatgctcgtcccatagttcagcgagcaacaggacttctccaaaaattttcattgactaaaaaggaatttaattctcttcgtcgttctggacaaccgacaaatcttctcgattttagcaaaaaatccatacctatattatcaaaagcacaaaaatatcttgaacagggagaacttaaacaattagatcagcggtataaaatgctcaaacgagacaagtggtatatcattccgaatattcccaagccagcggaagcctttttctttaagagatgtcatttattacctaaatttatgaaaaatgatgcacacattcttactactgatgcggcatatgggatccatatgaaaacaggattttctattaattccttacttttttcattttttaattctcttactttaacatgggctgaattgaatggacgtttttatggaggcggggtattggagttaactccctctgaatttaaatctctgccgatctatatcacaaatttcgaggagggaagatattctttcttttcttttaatattcaatcaaaggaagagataaatgattttttggagacacaagatcaaatgatactttcgaagcttggcctatcttctgaagatcaggagaaaataagaaatattcgtgagaagttacaaaagaaaagacttaggtattagtttgtatatttagatatagaaaaaactatttatttaatttcccatataccgcgagggcttatggttgagccatgtgtattctctttcgttgatgctggtttcatacgatctttttgccgaagttgcgttgccgcccatcggatatcataattccaagtataaaacatatcatcctctggtgataatgttttaccatatttgttccaaaagtatctgaatacaatcatcatcggtgctcttccattaagatctctaaggatctcgtaaaggatatctggcaaatcggcgcgtttcataacaagatttttgaatgaaattttcttctaattttacctatccaaactcattagaatccggcttagaagtaattttaatatagttgtccctctaaggaagtaccagcttaaaattagatttgttccgtgctgttgcgttctctacaaatacttcggattgttttgctcccctattttattctgaggatttttttcggaggacttgtcacatcgaataatactcttagagtattacattcctgctcggagtttactcatagggcacatacgcaatttcattcaataagcatcagttatcttcttgagaggattccttttgctcaatttcgtcgacaaggaaagattcagaagaagccccctcgtgaacgatctcattaatttttgtcgctagaaaatcggtcaatgtcattttgctgtcgagcgctttgcgctccaatgccgcttgaacatctgaagggagttggaggattacacgcgactctgtctctaccttgacggatggcagggtgacgggcaattcagccatcaaagaacgaatgatgtgttctttgacttccggtatcctttttttggccatccagttgtaaactgtcacttcactgacaaagcatttttcagccaaccatttgtagtccaaaccacgggctttcagccaacgttttacgtcggctttcaagtcttgttgtggtcggagttctggagtcattttctcgatactatcttttttgctaagcaagtcaattctggagcttttcatagagataaagtgctattcaaggacttgcatgaaagctatgctattgagctcagtggatattttgtgtgatttatttctatcaaaaatatcttgacggatatttttgatgagtcatagttttgccatatggagagcagtcaatgcgatgttctggagctgttgggaaagcttagcaatgaagccaggcttttcttgctcaggtatgcagcatggcgatctcttcctcttaccgacgcgcttcgggaaatagcctactacattgccaatcaaatggagatacccaacaaggcaatcctgatatctcgatcgcgttcttctgaacattcagcaatacctcattaacagctatgacactggatcaaattaccgtcggaatggaacagctcatcaatgccaaggcatcggagattctttcctccaaaccacaggatcaacaatacctgaactggcgcgatatgcaggaagtctgtcttgttgtgaagagcgcttgcgtcaagcaattcaacgaggttccccaaggagtggaaatgacctgctatttagccgaagcagtgctggctccggataaaaaagcgaagctcaaattgatgaagcaggtcatttcacttacatccggaacaacgggaatagctatcatcttagccggagtaggagccgccttggggtggggtgcgggcattgttacgacagttaccgcttttttcattggaacatccatattgggacccatcgcagctatggctggaggcgccatgctggccgttattgccgggtatttcatttttgacaacgatgcaccaactctgtcgaacaaagccgttgatgccctgcgcaaggggctcagaggggctttggctgaatactggaaggagcgaggaggccaattggaaaatcgttatttgccgggtaattaataattctcctatcatatgtctccatcagatttatgggaagtctgcataaaatcggcagctggcggaactcaatgtgcctacatgcacatccccgctgatgtcttgcgaaatacggtagatggattgtttccctctttggccaagaacgcagcagctgatgccgtttcgggatttggccacagatgggtgcatggtcatgatctgattatggacatcgccggccagtttttccggcacccagttcatgctgtcaaacaagcggggcatatcctcctgacagatttccccaccaaggcagggatccccattcccggtttttcacaatccggcttgggttcgttgctggtcgatatgggaataccgaaaggatatctgtcgctcaacatgatggatgccggcattggcttattagccataggagaaggttccagtgatctaatttccgccatgtccgggaatgtccctatggatgcgtggacggcttttgataccttcggagagggcgggatagaattggcattggggtactctacccaaaatcccttgttgattggagcggggatagaaaacatcctggccggttgtgtctccactctgaaaacctttaccgactacgttgatcctgcttcgtttttcgggcattcgatgacgggtgctattctgggggcgggggtttcctatgcactgaacaggaagaagggcaaggaagcccttggccggacagtcctagggacatcggccagatcagctcttctgggagcgctcagttcagcttcggggtatttcacggctggagctttcctgggatttacggccatgcaaataggaaaaatcatggctgcccatgcccaaaaggaacaaatgctgtgttgctcctgctcacctcttacctttgaacagcagctcaaaacgttctccgaggatgagtttttcagggagcattggaatacgcctccttttctcccagaagagagcttgtccattttcgataccccggcatccatggaaatagaaccatgggttcggcagtttctcgaagaagaaagacgaaacaggctcttttccctccgggaagcggaaaggcctcttctataacaattagcatccatgagtaaactatgaaagcctattacatctaccgggccgggagacaaccggacggtccatattctcctgcccaaattgtatcaatgatggaaagaaaggaaattctcggggctgctctcgtttggtgtgagggcatgaatcaatggatacctctatataaagttcttgatgatattcatcctcagagcaacaggcgcaatcatcaggtaaatccgccttcaggtttcaaactgactaaaaaaaggagaatgatcataggtgccggcattggttttgtcgcgcttcttttcattatccttttggcaggcaatgaaccaagccgacaaccttattatgatcgcggatattcatcttcatttcctcagtcgtcttattcccaatccatgtccaatgatgaagcggctgccataggaatgttgataggagcaggcatggctacccaagcgcaacgccaggcagaacctcaacaggccttaccatgcctgcaatgtgatggtaccggtattttatattccaacggattccgttccgtctgtcccaactgcggcggacagggacgagtgtatggcaatccccaagctgaaaccataaaggatgcattgaggcaaaggagatattactaaacgcaagcaatttacaatcatgtcctattacatttacaacaaacaagggaaacacgaaggcccttatgatgaagagcagctccgcagcatgttgaaagccggacgtatcgacaaggaagaattggtctcacagaatggccgttcctcgtggagccctatccatcttgttctggaagcggagcgtccgcctaattcttcgcaccaggaagagaaaaaatatcgccttttggctcaagacggcactcaaactggccctttcgacatcgcaactcttagagatatgctgcgacaggggaaatcccaaccttcagattatttttggacggaaggtatggacaattgggaacctattcatcatttgatcaaaaatactgatgaaaccgatttcaggacaaactctgcattcccgccgccccctgtaaataatcatagttttgatgtagaggaagtagataaaaaagccaaaaagggattgggctggtttgtgatggcctatgtcacagcggggcatttcatgactcaggcagaaatcaagggtaacgacacgatgagtgtagtaggcctactgttacttctggggctgatgatttacgtcctcatgaaactgtatgaagcatggaaatatattcaacctctcagttacctgattccttcgagagaacccataccttcacctgaaaaagcagttggctttctctttattcctctcttcaatttttattgggcgtttaccgcatggcccgggctactggaacgcgctcaaaaaatggcagacaacctgaatatgaaaaatattgtttttcatcccagatatgctctcggatacgtgatttccttcattattgattgtatttctgctctttttatcccttaccaacctttatggctatcctatgccatagggatccctgaagccatattattgtattacacctttgtcgaaatcaagaaggtgattatcgtcttcggagaaaaaaatatgggaaataatactgattaagagttgggggaatcggagcggacttgggaggatgactccgtaggataagaaaataaaatctcaaaatcatgaaatttcgaatagagtgatcaattacgcattcttgatgaatgctttataagtatccatctgttgaaatggatgcgttttagaagaaattttcatgagtttcctcctgtaattccaggattttggcactcaaacgagctggttttgactgaattacacagcagggaagaaattgagcgcctgtgaaagtttgtatgacaatattccagatcgtttcatcatagacaaattccatgaattttcacgtttcatcatgtctgttgctataaaggctgatatgttctttgccttgcggaataaggaaaaactggtggactggcgagggaaaagaaaagggatgcatttcattgcggagataatcttgcggaagtgattttcatgattgaatacaaaaggtttacgtttatttgagatattgttcttacggcagcatgttttataattgcggccatgaagcgtaagttaacatttcttcaatcacaccgttcctttctggggggacgtatggtttttaaaactcagtcccctctttttgataatgagattgatcccgattccgatcaggctagattcgaattttccggcaaaaatccttctgcacctggcacaacacgcaatttcactattgttgaagcagagcggttgactgccaaaaaatttctgaaggtactggaagagctcaagcaaaagaattgtctttcatccgacagcttggcggcagtcttttcttccccacctccacttctcatcaccccatatctttcggcacaaaatttggaaaccttggaacaacacaatttgagtggtgtcgacttttgcggaaacggagttcttttagggaaaggatttttcatgatgagaagcggattcagaaatcagttcaagccattgcccgttgccatgaagaatccttatacgggtgtggctattcaggtcgcggagacattgttgaactgcaatttcctgcccagtcagaagcacatatgcaattccatcctgaagaaatccggccagatttctttatcacaagtgaataaggctctcaagaccatggaagaagactctattatctgccgtagaggacgtatcatttgcctgcgggacgcggattctctgctggcctctttgaagaagaatcataagcgcaggaaagttgtcaaacgcctttatgtgacgaaagccatgggatattggtattcagcaaataatcaatttcctgaataatgcagatattcggtggagccactcgcccctttcttctcttcattatacacagaatttcaaggaacctggccccttggggttccgtgtgaataattcaggactgttgatgtcggcttttccttttgaggagacgcaccttccgggacaggcggattatgtttttgaggaggtgacggaacctctggcctattacaacacgacgatccttcaggatggccgtcgtctcagtaacgacctggaatgttatctggaggtgaatcccgataacgagcagagggagaaagccattaaaagtctccgtgcgaggatcattgacagaggatatcacgaagagatgcggaagaaatatccgaagttgtttggaaaactttaggcggggatttgtctcttgtatcccggggattcgtgggtgtatgctgacagaccatgtcagctgaggaaaaacctattgaagcccgaaaattagtttcatgggactggactgctttttggaaagaacaccagttactactgaattgtgttctctcaaaatgtcttccggaaattcagactgagtataaactcttttgctctgaggacttgcaggatggctacatcatctatgacgggaaggaaaaatctgtacatgtccgacatgacattaaaacaagcattttggtattttgtaaaaaacacagtgttcctaccaaaggtaattggtcgttgcaaaaacaaggtgttctccaaggaaaaaggttaaatcctgattttgcagctgcgttatggcatttcaaggctgaggaaattcaaaaagaaatacagctgcagaaagccatgaattctgatattaagcatgtagaatggtcttctgttgaactaaacatattaaatactcattcaggtcaaaaatcattccgattattgtggggatgcttgaagaaagctgaacgccgttatccggataatctaacgattgtttggaagttaaggtttttgaaacaacatttttcttatttgatgaacgatccatcattgcttgaaaagggatggatggcatatcaacaaggaatcatggctcaattaagactgcaaattgaatttttggagaagagtcaccatgccgggactgagttcgctcaaaaactcaaagaatccagagactctgaaaattttgctcagattgccgtatggggaaaattgatagatcaaatgagtattgatgtcttgagagaacaatcagatgatactgaatgggaagcattaaaggagatcatgaaagaatttgtgatggagcatcagaggattcctacacaaaaagaggttggagatatcttcgtcaggaaatacggaaactcccagtatacggaaactacactgggacggattgcgaaggatttgagtacatacaacaaggcagaaaaagaccaacgatctcgcaacagaagcaggtttcttgaacggtggggattttcatggctacaaaaagtgctgattaaatagccttataagtcatttgctataaacattcattacctccatacaacttacggaggaaatggcaggtacattattttcatcatctgtggttcattgagcaccggaaagagcttcttctttgtttcaagatccagacggatcgacaaagggtactttccaagcaacccgcttgaaaaagcaactgccccggagatccaaattccgaggcaggcctgaatcactcaatgatgatctctttagtcggaacttattataggggattgaggcggctgactcaagcataacattaacaacataattgttatgaatccaattgatacccccctattcacagctaaagatgtttatacggcactaaatgccatccgtgagcgtcttgacgcccttgccaaactaccgactgactccggttctgtcgtctgggccagtcaggcaactctcgccaaacgctacgatacgagcaagtctacgatttgcaggatactggcgggagccgtaagtgcaggcaaggttcagatgatacgtccaaacaatggagtccaaaagtaccatgttgcggaacttgattcctacatggtgtcgatttcggggaaccttaacaaacagtaacccatgaatcgcgaagaattaaaacagcccaaattccttctggagtactgtaatcgcatgtttggaacccacaaggacatcggaagggagaagctcttccggtgtccatttggagaacatcggcgccccaaactacatgtcaacgaacgtgacggaataggactgtggcgttgctgggcatgtgacaaaggcggggatatttttactctggctgcagaatttaagcaacttgatgtcaaatcacaattcccggatgtcctggagcatttggcggaggtattgaatatctctctggatggcaagatgagcaaaagaagctattcctcctcaagccgtaaaagagcaggcgcaatgtctattcttcaaaaaggtttgatgcaccgtccagaatctcctgtgtttcttgaacctgctaatgtgatggaattggaaacttgccgcaaacggctggaagaggatattctcctacgttcccttttaagttccgaattgtccttgcgtgaaggattgatgctctctgccaccaccgtttcccatcctggtctgcgaggtcttcttggagcgacggaagacggacgcttgctgtatctttatacggccaggggaagtgatggggacatcacgtatacgggagccaaactgcgttgcagaatcaaccatcccaaccccaagctctatttgaaagaaggcaaatggacatcttgcggcacaatgaacgctgagagctcgcgtttcatgtgggtagccggaaaagcttatcaaccttgggggatggaattcgcagagcagcgaaagatcgttcttatctgtgaaggagaatccgatgctctggctatcaatcaggcatttggctgtcttatacccgaagattcttccgtatttggaaatgtcccgcatgcgggaagttcggaattggttcctttcgccgtagctattcccggcgctcagagttttaaacgagagtgggcaggattcttcaaagggaagatcgtcatcctcgggcttgattccgattctgccgggcggaaagccgcaaaagagattcggcaaactcttgaggatatcggttgcattgttgtggactgggctcctccaagtccttacaaagatgcacgttctttattggcttccgagggtagtctggctttgtatcaatccattctctccgctcttaactctttttcaactcccgtagaaaaggaggtttgccatgcatgaggatgataggaagagtgagtttcagggagctatcagccctttattgaaaaagcttgagcagaatcaacatgtccttgcgggtaaagaggctgaaatgcctttcatctgcctgggaaagaacggtggcaaatatgtgtactattcccgaatgagtgacagccgaattgagttgaaaccgggcgaacacagtaagttgaacctgatcactttggcttccgaagcatggtggacagagaagttgggagagaaatggaccgttactgatgccgccggctattgttttggacaacaagggcgtaaacactactctcctgataaaattcgtggcgttggattctggaaagagaagagtgccattatctacaatgcgggagatcggtgctttaccatcgaaagcggaaagatcatagagacaagcaatattagggaggaaggtacaatctaccaacgttccgaaagccttccacatccggaaactatcccgatgagcgatgaagaaggacaggccattattgattacctgaattccttcgcctggcgcgaagaaatgggaggcttgcttttatccggctttctggcacaaggcatcacggcaggattcatcgatacccgggctcatgtttggatcaatgctcctgccggcacgggaaaaacatttctggtttcgaggttgaaggagctccttgggaattactccctttccttcactggcggaacttcggaagccggcattaggcaaaaaatcggttccggggcccggcttgttctgttggacgaaatggaggcggccaaccaggataagtattctaagcagaaggtagaaaaaattatgtctctggtccggagggcgactgatggagaaacgtccattataggaagcaaggagtctgttcctatcgaatttcgagctcgttcgtcttttttactgttgagtattggaaattcactgcaacgcacagctgacaaatcaaggtttatcaacttgcatgtcaggcccaataaaggactggagagctttgagaagagagatgatgcagctaacaaactggcgggcatttctcccggtaagttgattgcccgaatgatgtcgctggcgtctgtgatggcgaccaatgcgaatctcattcagcaaaagctgtctgcacatccggcacttgccggaagacgcgccgaactgctgggtaatatcctggcgggggcgtatgctctgactcatgcagggattatcagcgagccggaaatcgacatctatacggcagcgatgaatacaggatctctagacgaaaatcaggagactgatgcggaacgctgtttgcgtgagattcttgaaagtcgcgtcgtcggcaattcggagacggtaggacaggtcattctaaactaccttcacggtgattcctctattgaaagacaggatgcaaagaagctcctggatggaattggcatcagcgtataccgtcctcaaggaggaaatggctcttcacaaatgttgtttatttccgcccaaaacaggcaactatccaatatcctcagagatacggattggggcaactgttggggagacgtactgaggaatctccccgaagcgagttggttgtcggaaaagcgggtaagaaactccaaacacaagggcgtcgtcattcctatcgaagccgtgaagtcattgctcgaattcgatttgtcgacagaatcacagaatggagacatgaaagagacataaaacaatttgattgaaagcatattatgcaaaatgtcgaatagtttgacggaaactgcatgataaatgaaaatccccctgagttctcacggatactcagggggattatgttatgcagttgaatgaggaataattatgcaggcttggagggggattgcggcgatatggcttgtcccagttgagctatggattcagctaccgcttcttcctgtggacggtaatagcctcgttcgatgtcctccgaatcatgaccaacaatataacgggccatatccggagacacccccatggagcgcaacatggtaacggcagtggctcttaaactatggaaacttttttccgcaagggttcttctgtttccctgggctttctgatcgtgccggacaatcaatccatgtttgcgtaacagctcagtgaagtcccatgagagcttgcttgagttgcctgcttgtgagtggcgcatggccgacagagggaagacgtaatcattgatttttttctcgtgccgtctctgtagaatttctttcaattgctcaataacgggcttgttcattcttctctttgtcttttccgaggtcatggagattcgccctccttccaaatcgatttgctcccatttcagcttggcgatatcacccaaacgttgccctcccgtatacaggcagacctgtatcatatcgggccattcattcggaaagtcggaaatcattttttgtacttcctctacggaaaaggcatctcgttcctgcctgtcattccgagagcttttggagggaatgactcctttgaaaggattgatcgtaatgatccttttgctgacagcgctattgaaggcacacgtcaaggattcaagatacctcttcactgttccgctggatacacgctccaattcttttgccatgaattcttctgcatgatgaggagtaacggcatccagaggaagggttttgcggtcatccagatagcacaagaattgtcggacagcttttccatcacggtcaacagcccctttttccgtacgggacttcatccagtctttcaaaaaatcatccactccctgcatatgggctttgcctttgagcagagcctttgccttggaagatccggctaccgcatggacgatttcggtgtttgccttttctcctttggcggccttctccaattcattggcgataatttgtgcattcagcttgagctcggcctccattttggcttttgtcttcccggggagaatcgtcgaaggggagacctctattttggtcgttttgattattcttttgccattgacgtaataggaggcaaaccatgtattgttccgttttttcaatccagccatagccttaaaaatcagttggaatttgcgatggggtacattagggtacatattgtaaaagtgtaccctaatatgtacccttttttcatgcaatcgggtcgaatgcggtacaatcacgatatgaaaaaaccttgcaaaatcaaggactttgcaaggttatgaaaagaataaaatggcggacagggagggattcgaaccctcggtactgttgccagtacacacactttccaggcgtgctcattcgaccactctgacacctgcccgttgatagattgtcttagataggaaagcggaggtaatgtaacggtagaagagagggttggcaatctttttttcacccaggaggcattttcctgtttttctcaagctcttctctcatttccggatgttctctgacaaggatggaaagcgcatgggtatttagagaatcccggaaatgggatggtaagagccccccatgcataccatataaaaacaggcttctgtgatcacagaagcctgtcattgaacaatgttgagtccttcatgcctgatgcctccttctttagaagggcaaagaacgtttttcctattttttcaacgtttgcgtctttcaggaagggactctcgctgtctagtcattatttcttttccgggcgttcgaggctaatgccccatttttcctgcatgaattttttgtggaattcgagtttgtccttgaagcggttcaggtttttcacctccttggaggaccatgcggtttccacgagggccagagcacgcgggtaagcctggtagaagacgcgctcaatgttcggcagacgttccgcccacaggcagcagtctacgccgcgcacacgttccatttccttggcggagaggccttgcccgggttccagggagtacacgttttccagcgtgttgacgggcatccagcccgtgtccggctggccggagggccagtcgccgggaagctggggatagtcaaagtagcatttgccgttgggggcgcagataacgtccaccttgtcgcccgtggtgttggctaccgttttaggcgtgtggccgcctctccacgtggtgacgattactccatccggatatttgcccatgggctcataccagaagacggctgtttttccgcggcttttcagcattttggcgcaccgggtgaagaattccaccatttccttttgcgcggcggcctttttgttttcctcacggataccggctttctcacggaagtcagcgcatttggggcatttcatccagttgtcttccggcgcttcgtctccgcccagatgcacgtattgggacgggaagatgtccttgagttcattaaagacggcgttatagaatttccacacgtccgggttgccgggacataccagcgtgtaggagatgcccgcattcgtgcgcacttccagcttggggttcgggaagcagaggaattccggataggcggtgcaaagggcctggttgtggccgggcacgtctatttccgggatgatttcaatgttccgtgcggcggcgtatttcaccaggtccttgagctgttccttggtgtacatgccaccatggggggttttgttgccaaaggtttccttacgcctggaggccacgctttccagcttggggtatccgggcacgggaaggcgccagccctgatcatccgtgaggtggaaatggagtttgttgaatttgtagaaggacatcacatcaatgaattttttgacgtcctccaccggcacgaagtggcgtgcggtgtccatcatcatgctgcgccagccaaaccggggcttgtcttcaatgacgccgcagggaatgccgccgtccttgtattgggcctggagctgttccagcgtgtttttggcgtaaaagaggcccgcgcggtcgccagcctggatttccacgccctgcggcttgatggtgattttgtatccctccggccccagggccttattggcggcctgcttgaggattttgggagatttacagactccggaggaagtactgacttcgacgggttccgggacgatgtgatagagacgggattccacgtcgccagcggcaaaaacgctgccgcccagcgccagcagaagaggtaggatacgccatttcattgcgcacgattctgacggaaccgtattccatccgcaatcaaaaaagaccagaggcttacggcatgtcccggaaaaggcgcttcccgcctgcacttccatcttgacggatgcctcaaagacaggtttgctagtcctgcgcatgggagagtccttttacacacgcactacggagacacccccctccgcctttgatttgtccctccgaccgcctgccttcagtgagttccgcgggcaggagaagatcaaggaccgcctgatgctgatggtggaagccgccaaacagcgcgacgacgtgctggaccacattctgctgagcggcccccctggcctggggaagacgacgcttgccaatattatcgcgaatgccgtcggctgccgcatccatacgacgtccggcccccagatcgagaaggcgggggacctggcaggcgtgctgaccaatctggaaaaaggggacatcctgtttattgacgagatccaccgcctgcatccggccattgaggagtacctgtacccggccatggaggatttccggctggatattattatcgaccagggcccgaacgcccgctccatccaactgaatcttcccaagttcaccctggtgggggccaccacccgcgccgggatgctgaccagcccgctgcgttcccgcttcggcctcgtgaaccggctggattattacacgcaggaggatctgtgcgcgatcatcgagcgatccgccgggctgctgaacgtccccgtggaaccggcaggcgcgcttcagatcgccctgcgctcccgaggcacgccgcgcgtggccaattccctgctgcgctgggtgcgggattacgcccaggtacgcggcgacggcgtgattacggagcaactggcgcacgatgccctgaccatgatcgagattgacgacgacggcctggacgagatggacaagcgcctgctggaagccatgatttacaagtttaacggcggtccggtgggcctgtcctccctggccgtggccgtgggggaagacgcttccacgctggaggacgtgcacgagcctttcctgatcatgcaggggtacatcaaccgtactcccaggggacgcgtggcgatgccttccgcctatctcaagatgggggccacgccgcccgccaacggacagggatggctgttgtaagccatccgtttacggcatggcaggagtcccgtgttttgtgctggtcatcaggcctcctttcttttagactgtccccacataaaacgtcaggacgttttctgttcatcatacgcccaaagctatggccgcaaattctgatatcgcctttaaaagactgcccgtcaagatcatcggtacgggctcctatgttccggaacgccgtctgaccaatgcggacctggagaagatggtggacacttcccacgaatggatcatcgaacgcacgggcatcgtggaacgccgcatcgccgcccctgacgagtacacctcccacatggggacgaaggccgcccagcgggcgctggaatcctgcggattgcagccggaggatatcgacctgatcatcgtctccaccattacgccggatacgttcactccttccacctcctgctatatccaggacgccctgggcgccaagaatgccgccgcctttgacatttccgccgcctgctccggcttcctgttcgccatgaaaacggccgtccagttcctcggcacgggccagatgaagacggccctcatcatcgccgcggaaaaactttccaccgtcgtcaactgggaggaccgcaccacctgcgtcctgttcggggacggcgccggagccgccgtgctccaggcttccacaggggaagaaggggaaggctccatcctcgctacggacatcggcacggacggcgccctgcatgacctgctccagattccgggcggcggctcccgctgccccaccacggtggagaacgcccacgaacgcctggctaccctcgccatgcgcggcaaggagaccttccgccaggcagttccccgcatgaaggattccgccgccagcgtgattgaacgcgccggcctgacgtcggatgacatcaagctgatcattccccaccaggccaacctccgcatcatcaatgccgtggcccagcgtctttccatcccggaggacaaggtgttcatcaatattgagaaatacggcaatacttccgccgccgccgtggccatcgcctttgacgaagcgcgccgcaccggcaggttcggcaagggggacaatgtcgtcctggtcaccttcggcgcaggcctcacatggggcgccgcagccatccgctggtaatttccgttattccattccagaaacttacattacacatgacaaccgaaccgtacggcaaaaagaatccgttccccgcacccgtcctttccgtcaagcacctcaccggggaaggcagcccgaaagaaacgatccatattgaatacagcctggacggcgccggaatggtgtacgttgccggagacgccctggccgtcattccctccaatgattcttccctggtggaggccctgattgaaaagctcggcctcagcccggattcccaggttcccacgccggaggggggagccgccagcctgcgggacgccctgatcaactgctatgacatcaccaatgtcaacaaggctctgctgaccaaatgggcaaccgcttccggcagtcaggagctggaaaccctgctggccggggacaaggacgcgctcagcgatttcctgtggggacgcgacgtgctggacctggcaacggagtatccggcctcctttgaatctgcggaggcttttgcaagcatcctgaaaaagatcatgccgcgcctttattccatcgcctccagcccgaacgcccaccctgaagaagtgcatctgtgcgtgggcgcggtgcgctacacggcccgggaccgcaagcgcggcggcgtgtgctccacttacatggcggaccgcctccagccgggacatacggccagggtgtttgtgcataccaacaagaatttccgcctgccggaagacggggatacccccatcatcatggttggccccggcaccggcatcgctcccttccgggcattctgggaggaacgcatcgcctccggggacaagggcggcaattggctgttcttcggcaacccatacaaagctaccgatttctgctatgaagacgagctggccaaattgacggcggacggcagattgaaattgtccgtagcctggtcccgcgaccaggagaagaaggtatacgttcagcatctcatggtccaggaaggcgaagagctctggaaatggctggaaaacggcgcatgcttctacgtctgcggagacgcctcccgcatggccaaggacgttgacgccgcccttcatgaagttatccagacctggggccacaagactccggaagaagctgcggagtacgtagcggacatgaaacagcaccgccgctaccagcgggacgtgtattaatccggtatacgctttctttccttttaccgcgcctttccactatccgtgggaaggcgctttttctttttactacggagaagccgttaccggtaaatccggttgacgcagggaagagcggcttgccttttttcctccatccctttttccgggttttccgggccccttgcggaaagggaatttacttgccccatagaaatcccttatacaacccatttaccaggagggaccaggggcgcatgcaccatctttccgccctgtccgcccagacgcaccagcagtttacccgggcctggagcttgtcaaacgccttttccatctcagccggctcctcccgcgagcaggcctgcacataagcattaaaacagggtccctccagccatccatgcagcatggaaccaatctctttgaggaaccggatacgggcttctttctccatcttcagcagtctgggcacatgtaattcccgcaaaattaaaaagtgcacggcaaactgccattccctgtgcggcatcagtttccattcctccagccggcgcgtcagcaggtcttccacggaaatatcacggcaagcctgctcctgcatggcagagccggcacgctgtacatagatggagcccactttttttcccaagccaatcatcgccgttcttctcatcaaccgcatccagtacaggacatcctctccgtatttcatgcctgcttcccacaagggaagagaagatgccagggaggaattcagaacaacgctgctcgtatggatggataaaagccctcttaaccccagtttcctgactacgaaggagcacggttttcccttcctgcggggaatgcaatcctccttgttccatgtatatctggcggcataaacgtacacgccgggatgcttccggaaaaaatcatatgccatcttcaaatgatcaggataccagtagccatctccatcaaggaatgccacgtattttcctttggccgctttcattcccgtgtttctggcatgcgaagcgcctccattttcctgggaaatgacgttaattctggaatcctgaaaaaattccaccacttgaagggtgccatccgtcgagccgtcatcaacgatgatcaattcaaaattcttaaattcctgatccaatacggattgaacggtttttctcaaataatgctccagattataggcgattaaaatcacgctgaattctatccaaccatagcggctatcccggatatgcctgttcttttcttccattttccagatttaaaactcggtggagaaatacaggatttctaatccgggttctttgtccggatacatgaaggtttaccaacatgcacattatgagttttttatacggcttcatgctgctgcacgacaggaaggacatttctttccaggattgcctcccctcaactgtcaccatttatattaagtattttttattgaatccggattagaaattcgcggttaagccatcagttctcatttttagtaacaaaacataaaatgctttttgctttcctatcctgattcctgtttttccggataaccaaagaaggatgattccatgaaatacggcacttccttcattttttccctacatccctccgatcaatcccttcggtttgaaaagacgcttcccggaggctttcacctatcgacaaagattatgcatcgcccttccctgcatgcagttcatccccctgcgtccctatctgccaaatgaccggtatcaagatttccccttcttctttttcgcgcatgaatacgcattcattccctttttcccattccacgcactcaaacctgcacacgctattccccatgcagcagaggaagcagccatgcagaacatggttccatgaacacttcacggaggttttatccaagagcttttccctgccctggcgggccctttccatccggggtcttcaggcaccccctaccgcgctccgcaaacggctcttttcactttcctgagcttgaaaaagaagaccatgtagagcagatacagcttttgcggcaagcaatggacgatgcccatccatcccggcttccttagcgcccacctgcggcggaaggaatagttccaccagttctgctgttgatcaatgcagcgtatcgcctttcttctctcctccatttcgtcaagcaattcttcccgcgaacggaaaaccggagtgcggcccttcaacaagtccttacacagttccaggccggcttccttgcttttcttcaactggcgccgcatcagccgatcccttttttcaaaggccgcagccgttttcatgctggcaaaccgcgctgcactgttgacggcacaaatatttttgacggcaaacctgtaatagtacagggagacatccggcaattcatagatgctgccttgcagccacacatgaaatcccatcaggtcatcttcaaaattgtccgtcatcggcagggagcgcccccattggcaggcgcttttcctgatcatcatactgcctccgtaatgggcagtggaggagaaagtcccctcttgaagcctgatcaccggggcctcttccggaacagcaggaaacgccgggaatccgaacataacgccggcttcctcatacacgcgggtcatctggctgacgacagccacggcatccggatgctccgtcaccactccggcaaaaatcctgcacctccaggggaaggaacagtcatctccgtcctgacggagaatccattcatgggtggccaactccacggcctgccgtatatgcggcccgcgccccagaggggtttcattccggttcaataccacacggtgcggtccccggtactccgccgccatttcctgcatgactgcaaaagtaccgtcggaagaaccgtcatcagacaggatgatttctaccggcccctcgtaatcctgcccgaatacgctccggatggcatctccaatgcaatattcctcattatgcccggtcagaataatgctgatggaggggagttccggaggattcatgaagaaaagcggcacggaaaaggaaatgtgaatcccgagatggactatgatccacagtacttatagataaggcgtcacgtttgtaccggattaagaatccggcgtcaacggaaaaatctgggaaaaagtttgttaggggtaatggggaatataaggatgacggggataacagggattaaaaagattctcctatcatcctgatgttccctatcatgcgcatcttttatggcggcgttgattaatcacggattcttaatccgctatgatttggtccatcaatgcgttgattaacaatgaaggcgtcacgagggattttttccctcctccatttaccgattgttattactccagaatcagcgcgaagtctttcctccacatccggattcccgtccagctccaaaagcgttccatctccttcctaaatgcagaagccatttttcagcgttattattccagcctataacctggaaaaatatattgctgctaccattcagtcggtactggctcaaatatttcaggattttgaaattattatcgttgacgatggttctacagacggaaccgtttctatcatccaatcttttcacgaccaaagaattcatcttatttcccagcgcaacggcggcgtttcgcgagcacgaaatgcaggaatgaagaaagcccaaggcctttatatcgcttttctggacggggacgattactggtacccagaacatttggcgctggcggctaattttttcaatcttcatcctgagatattggtttattccaaccgtcacatcctggacgagttggccaacatagcgccacgtcccccatcccatcctgtattcatccggaaattggggttaaggggattgctattcatgcacccaagcaatgttatcctgagttcatctcttgcgtttcaacttccgtcctgggaggaaaatatgtcctatggagaagacaacctgtactggacgcggtgcatgaggcagacagccctgatcgggctgggaggaaccgtcacctcaatttaccggcaaagggcatcatccgccatgcatgatgtgaattaccggcatgtctccattcatacgctccttgcgcccttgctgaatgaacttgaagccatgaaaaaacccacatggcagttcgccgttcatttcctgatcatcagggaattgcattccaacaggttgctggctcttgacgaagaggaaaggacctccttgctgggcagaatcaggaaggtgacgcatccctacctgaaccggacctattttgacgcctatgcgaaggcatgttttgcaaaggaaggaatggaacaatcatttactgcgctcatgaatagaaccgtttccttatgcgtctggctggaccgcctggaaagaatgggaagatccatgttgtttctcaatagaaaccagtaacgcggatgggaaacgcagatccatttcttcacctgccatagtccatgccggacctttaccatgaacatcgtatacgctacagacgataagggagcgctgggaacgggggtaagcatcgtttccctcatggagaatttaccagccgacgttcatgccgatatttacatcatgacagacggtttgaacgaggataatacggctcgtttaaattctctgcaacggtcttaccgcctgagtttacacttcattgacatgaaggataaatacaaggattttcccgttggttccaagtggtcggcagcgacgtattaccgtcttggcctcgcaggggaacttcccgccacggtggaacgcgccctgtatgtagatattgataccattttcaaccgggatatcagttccatgtatgaaaccgagttcggagattgcctcatcgccggcgttttcactacggaacatttgactgaggagtttttctcacgctggaaacgggaaatgaatctgggcagggattccatttacatcaatgcaggcgttgttctttatcatgttaagaaaattcgtgaagaacggtttgaagcccaagttttatcttatgcgaaaagcaacatccatcatctctcctggcaggatcaggatattttgaacgcatgttatcaagaacgtattttcttgctccatcccatgtggaacatctgcgacggcgccatttggtcgatccgctgggaaggaataaaaagcttcgagaataatcccctagagccgaaggatttgttggaagccgccaccagtcccggcatcattcattactgggggcatcccaagccctggcagcccaatagcctgcgtcaggataacgggctgttctacaagtattggaaaaaatctccgtggaaagataatatccgggatttccgaaagcaaaatgattctgcccgaatgtttgtttcccgaatgagatgcctcctggggaagggcaaacggcttttgcagggcaaacaccagtaggattgcgccagcttttcctgcctttcccgatgaccaggaagcaaccgatttacagagcgcttttttattaaggaacgccaatatcagccattttttttcgggataccatccgtattccttttttccttggtatttccccgagtcaggaaattgtccactcgggatttccatggctgcaaatgcttcaaatgcacgaagctcatgtctttttcattccgcggctgatgatgatccgaagccacagcttcagaatttgcctgtctttcccgcacataaacgttattacgaaagcagaataagcccattttttccttttgatttttagctttgcgtacaaagggtttttcatggaagcccttttcacgcccagattccggtatagtgattttccggcttgtccaaaaagatcattttacggatgcctccattagttttccacgaccgggttccacggtgactatttccgccaaccagttctggcagtacacgcattcaaagcaggccagcaaagcgtgtgcaagaatgcgtcaacgttttatacctgatgaccgtatcggcaagtagggagtattttaaaaattagtttattcatgaaagttgacactatcaaaggaagttcctatgtaatgacttgtacaaaagcttgtacagtacatgccgttttaagttccagcgtggatctcatgcttgttctggaagcaggaaaagcgggccaatacggttttgtggctccgacggatgcggtagaaatatccgatgaaaacgcttttgtcatacagatttttaaaacgcccgtcccgagattgtttgtccaggacggcgttcaacccggagaggatgccattttaaaaaatatgatggcggagtccggaacctttgccggcaccgtcaacgccaacggaggcgttcgcgtgccgctgcctgccacggcccaggaggccctgtcctgggactccatgctcgaagagcaggccagacgggaatggctcctggtgcgcagcgcctcctatgccgccgttccgtcatgggtggcattgctggcgcgcatgcaatccctcagcatttacaagtattccagcgccaatgcatccgtcaaggaaggcatcattgaaaatgaactatatgaccatgtcattagaatgactcccgcctccggcatttccttgctgggggtgggcaccaagccctggaaatttgctcattcactgggaacctacaaagattccagttttgcggcggcggcggcatggtgcattacgggggcggacaaggcgtccatcatgctgggaagcaccacacatggctatggatgcaccacaaacccgtcctcgccatgctatgcgcatcccattcactggtgcaattatgaccatgccgggacagggcaggattacaggtttcctctgctcaattccgttaataattacaacggttatgatatgacgcccgcctggcaggcgactttatacggcaagtcttacctgggcagttctgcatcctgcttgattcgcggcacggattacgggcgcggcaacggggaagcccggtatgtgtgggcgctggtcccaaacgccacctatcttgccgtagcaatggcgccccggcatgcggcagaccatccctacgttgaaaacaggtgggagttgttcgtcgacgggcaatacgtcatgcccatgacagcgcggttctgcggcggcggccatacggctgtattgtcagcaacagtcaaagcccatgaagtggccagcgcgcaggagacagggttgagaatggccggaatgcgggtgaacacgggcagcctgcccggcagcacggcggccagggatatcctggggaaggtggtcatggacggagtggcgatcaagcccgtgccggaggtgacggcttccgcgctggaggtgggagcggaaggcggtgaagtaacgctgacggtatcctccacgctggcggaggctgtgtacgccattaacgacacgatgtgcgggcatgaccccgccgccgtatggtgcagccaatccgcggagcagataccagccggcggcggccaaatcaccctgacgcttgcccccaacacgaccgggcaaccccggcaagtgtgggtttttgtcggccaccactatgcccagaccgctgtcgtggaaatcaaccagttaccctgaatatatgaataaaaaagagttgcacttatttttcctgccaaggaagtaaaaaatccttataatgccccatagggaacgcttactttttcctcttccagagcagccgcgtccccgctattgccagtccacgatgtaccatgccacgcatgcctttcgtacagcaatacattaaaagaatcgttatgacgccataggaaacaaccatcaggaaggcgcaggcaaaccagttcaggaaagacccggagggttgcaagggggaatatttccaaatccagttcatcagcaccataggtatcagaatcagcgccagctggtaaccgaattggagccagtaattcatcacgttctttctgaatccccaagtgtacagcatgaagggtttccaaatgccaacaataagcaccaggctggaaataccccccagaagaatgccgggcaatccccataggtaacctccgataattgctacggaaatgttgatcacgctttctacaatgggcgcccagacatcccagaacaggccgtagccgtataaaaattgatccactgcaccccgcgtgacagtgatgaacaggttgatgatgatcaggatcatgatttcccgggggaggatgtagcccgctcccagccaaagcgtgatgaatggctccagaagctggtaaagggtaaagcagattgtcccggctatcagcatgcgcagggaaaataattcattgaacaccttgcggattttttccgcattcccctccgcgatcagatttcccacgctggcttccgtgctgcccagcaggttgttgaccaggaggaacagtttatccatgatggtggaatagttgccatagtaggcgaccatctgcagggaaacaaatgcataaaccagaaacggcgtgacctggaactggaaaaaataacccagccgatgtacaaagagctgcctggtatatttaataacctcagggtatttcctgaacagttcctttcccagagccacattgcttttcaaccagggatatacctgattaattttccagttaaggatgaaggaataaataatgccgaacagcagttctatcattatccatagataatagctgcccgtataccacgcagataatatctggcataaaattttgattatggaggccgtctggaaatagaaggccaccacgtaattcctctggtccgcccccaggagagtctgcctgtagttggcgaagtacccaatcagggaagaggcgagaaaagaataataagcaaaatagatgattccataggaaaatcccgttgaagggaagatcagcggcagaaaacaggaaagcagcaatccggcggcaataatgatgcgccctatccaccggtacatgtaacccagaacagaaataatttcattaattctggcctcatcatgttcaaaaataggtttataaagcacatatccgatagccgtgcttatgccaagctccgccaaattaagaaaattcagcagattcattaaagttcccgtcaaaccgacgaaatcagcgcccaggcaattcaggaaaacttttcttgaaaaaaatgaaatgatgagaatcagaacataaaaaatgaggttcacccgggcattcaacaggcttttttttacgcgagactccttcataccatttattccatggacttatcctctcttcacgagaaaacaaaaaatacagaaatcattcatacccggtttcatttatccggctggtaaaatacaaacaggatattctgccagtcatacggccatgaaaagcggcattaatctagcacaacattccactgcatcaacatctttttatccataagccacaacctgctccataccagttatccaacattgttccataaagcattcttgttttatttccctcttccatctatattaccgcccgtgagcaaaggaaggattctgattgccgcctatgccttccctcccggggaaggaggcgtgagtatggcggcctatgaaatggcgcacagcctgggctccagaggctgggacattcacgttctcacccgccagcaggatttgccggaggatccttcccgcacaagatgctgccccatcacggccctgccggattccctgacggacgacaccaaccgcttgaaggagtacctggacgcttttttaaaagatatccagccggattttatcgtttaccattcctggtcgggctggtgccggaaggaattgctggcatgcgcacgggaaaagcgccttcccttttttctgcgttcccacggcatgcccaccaacctccgttcctatttccgcgtggactaccctccttttttcggcatgaaaaaatggctctgctcctttttccaaatacgcaggggcattctgaacgtacaccgggaatccccgttaaaccgccttgttttccttgactcctatggaacgcccttcaaagggttcgattattactactgctccaaactgaatctttcccgttacgtctgcattcccaacacgtttccggcgctgaaacaagccgttcctttcttccgggaaaaatacggattgtcccacgctcccgttttcacgtgccccgccagcgcctgcaacacgaagcggcagcttctgtttattcgccatgtaaagcaaaccaagctggacaacatcgttttccttttccttgttccgcaacgcaattcctacgctgagcaaatggagcaggctattggggacgatcccagattcaggattctttacaatcttccccgtccggaggtggaagccgccattatggagagcgccgccgttttcctttactcctatcaggagcagcagccgctttgcattctggaggccatgtcgtgcggcatcccatggtttgctcccgatgtgggagccgtttccaccctgaagggaggcatcatcctgaaaaaaacatcctccgccacattggaaaaaaccgtgggggctctgacggacgaaaaattccgggagcgccgggggcaggaggggctgcggcaatggcaggaacagtatgacccatcagtcgtatatcaacaatgggaagacctgctcagctccattgcctcctcccgtaccccaaagcagaaggattgaattgattccatgggatgaattcggccccggctattttcctcacgaacgttatcccacggtaaaacgccttctcaccattttcatcattgcattttccggaccagccaagtttctcagttatgagaattttcgcgttaaaatttttcaataggagattgcggagaccaagtctcccgttttaaagaaagaccattattgtatcagtttaaaaaagggattccagatagaaaacagacacaatctttttttcatcttgctcgcagccaaggcgctcatcatcatacttgcgcattttctggacttttcaattcgtccgcgttattaatagtccttgctgtttttatatggaaaatcggtcatctcttcctgttatcgccattttggcaaacatgcctttgggacgcttgcttcctgaagagtttcaagatcaagaccacaccttgattccatggatttatgcttttttctgcgatctggctcatcaaaaacgctatgaaattcattggattactctcaaaaaatatgtaaaggcccataccgtccggcaactgaaaggccagaccattcacattctgcctgatccaagtttggctctgggacttttaagcgggcattttcttgcctctaaaagaatacgccttcttctccattccctgaaaccagccctggtccatgcatggggcattgaatttccatatgccaaggcatgcatgaaccagccgtattcccgattattatcataccagggggccctgcatgcctattgccgggaaagtaaaatgccctttctggcgcaccttcaagcattctgggaaaaacgaacaactccggcataccagcatattacatgtgaatcaccatgggctgcggaatgtgtccggaaactcaacccggcagcctccatccatcttatcgactacggcattgagtccgagttccaggaaaagaaacgcgctcccagtacacggccatcctgcctgttcgcaggatcactgaacgaacgtaaaggtcttccctttctgattgaagcctttaaagatccctccctggcgcatgtagacctttatattgcaggaaacgggaaactacgcaccaagctaaattccgaatgccctcccaatatccattggcttggggaactatccaggatgcaactcaggcagcagatggaaacggcctggtgcctgttacttccaactctggccgatacaggacccaccattgtcaaggaagcccgctgtatggaattaccggttatcactacggtcaatgccgggagcaaacaatacgtcgaagacggcaaatccggatacatcctcccagtcaaagacagcgaagccattcgccaagccgtccttgccgtgacggaatccctggataaatccattgccatgggaaaatacggaatagaggaaataaaaaggaagctcagtattcaaactacttcccaagactttatggacgtctatggctcgctgctggacatgaaagaggaaaataacacggattcctgacaggcaggtttttcttctacctccggagcttccaaagaaaacttgttttcgcctttcttcccatgataaaaaagctcattattcggttcctttcaaagataggctgcctgctgctcaagctccggggagtgcgtaccggaacgggcgtcatcctgtccggcctgccccggattaaaaaattcccgggagcttgcatcaccatcggcaacggcgtcaccatccactccatggcgcggatgaatccggtgctttcccaccatgcctgcctggcggccctttccaatgaagcccgcatcaccgtggaggacggctgcggcatcagcggagccaccctggtttgcgtcaacggcatccacatcgggcgccatacgctgataggcgcagacacgctgattctggacaacgacatgcactatccccggagcggcgccagctggggcagcacgtggggaaatcccgggcacggcaagcccattcacatcggagaaggctgcttcatcggaaccagggccatcattttgaaaggcgtcaccatcggttccggagccgtggtagccgccggagccgtcgtcaccagggatgtgccttccggctgtctcgcgatcggcaatcccgcagaaaacaagccgctgcccgaacgcctcaggcatccggaaaaatcctgactgcgccatgcccggcatttctactacaggccttcccgctacgctgttccttgccggacccaccgggtcgggaaaatccgccgtggccgtggaactggcggaaatgctgggtgcggaaatcgtcggttcggacgcctaccaggtgtaccgtgagcttcccattctaacggcggctccctccccggaagaccgggcacgcgttccccaccacatggtatccatcattccggcccggatgccctgggacgccacggaacactaccaccgcgccatgcggtgcgtggaggatatccatgcccgcggaaaaacggccatcgtcacgggcggctccggactgtacttcaaattcctctcccacggcatgtcggaagcgccgccgggggacgctgccctccgcgccgcttttgcggactgttccacggaagaattgcacgccaggctggcttccctggacccggaaggcgcagccctgaccaattcttccaaccggcggtatgtggaacgcaacctggaaatcgtccttgccggaggaaaacccctttccttctggaagcggaactggctgaagccgcccctggggcccggctgggtcatcaccagggaagttccggaactggacgggagaatcgccctccgcgccgcacgcatgatgcaggagggggccgtggaggaagcagctgccctgggcccctgctccgccacggcggaacgcacgcttggcctagcgctgatacgcagcctgctgcgcggggaaatcacccgtgaaacctgtcaggcgaaactggcgctcgccacccggcaatacgccaaacgccagcgtacctggttgaaacgggagcaatggctccgggaacttccggctgccccctccgcctccccccgggagctggcgaaatgcatcatacgggagctggagcattagccccctcctaggacggtaaacatccggaaaaccgcccgtttcttcccccggcaaactgtatctaacatatttttggatgcattgacattaaaaggggcggaagactatcatgagcataactctcctcagctcgcaccctggcatgaactttccctctttccgcctttcctctaccggcatttttctgcatgccctggcaacctttgttcatgcagaagacattcccaccacggatgaccgctccctgtacatcgaatcggaaaccaaggttgtctctccccaatgcctcctcgaccaaggagaccaggacgaggacaggaaacgcaccaaagtcggtattggagaagtggtcaccttggccctgaacggcaagagagttagggacgtagacccggattcccttgaatggtccctggagccggagaaggcggccagcattgagaaatcaaatgacgatattaatcaagctacgctgaccatcagcagaaaccttaccgaggatactaacctgaaggttcgagttaaaaccagccttgatgaagaactgccgaaaagagaaccctccgttttcagcattctcgttccctctgacattaaagcggaacattccgggaaacgggtggaaaaacatccccgggacaaggagaaagacagaccgggagcttcctccaagcttgtcgtgacttttcttcccttggcggtcagtttcagcaatgttcccatcatggaacgggcagaagacccggaaggattcaaaccggtgcataccccgggaaaacagctgatgtggcccaatgccctgaatgcccaccatcatgacaacatcggctggagatgggacaaggagaaggatattcgcttgcagcacttgcaggacatgaaacttcccgattccttttcatggacctgcgggtggtacgtacacgccgacggcaaggactgctgcaaggttggcaatgacacgtattcccaggatttcagttttgagtacgaagatgaaagggaaaccaataaagactcccccaccaggggcttgaaaaatatcaaggtaagcatcaccaaattcggatgcaccgtcacgcgcagcacagcagacgacgccctgcatgccgactctaccgccaatccataacctcctgtttttagcatcatgaataaatcttatcccttccttctgttattcgtcctttactcgctgtcttttccctgttcagcctctccggagcaggaccagctcccccttccttccgccatcaggaatctgaacaagcaaaacccggaactcctgcggcttaagaaactgctggacagtggccagatcattccgttctaccagggggcggataaaatattgaaagaagccaaccgctaccggaaaaaggacgtcacccctcaggagctgacggaggggcttttcctgtgctatctgattgccaaggccccgttcattgacctcaacgattacgaaaatgtcgaatggcttgctacctacactagcgtagatcaccacgcaaaagagtttttcacgaacagcatccctttccttgcgctaacggacaagaatagcagcctcccaggcagggaagaggcccttcgattttatttatccgcaaaagctctgatcatcaaacaattccacagccaggtagattatgcttttgaagctacggaaatcttcgcccacatgctcatcgaccatgcctccggaatgccagaaggaaacgataccaagctgttcaacaagacaagcgcgctgagttcgagaagcaacaacgctcaattcgccatcaaaagcaaagaacgcggatttatcagggaactgatgacctgcttcccgaccaaggcccaggaggttaaaaaatacctgcgtctggccggatacagggacaaggacattccggccctgctggacagaaccgtcggccgggtgccgaaagcggcctacctttacaaaggattgcccaaacagaaaaattaaagaggcatccaaatccggacaacaaaagcgtcactagtgcaaaccctttcctgcataaaaagactgtaaggcatcttcttgttttcccaggttacgccccggatattcgtcttccacgctttttgtcttggcttgcgggggcatctttggtttacagaggcaggcgggaaaggctttccaaaagcaggccgcttcattatattcatctctttttcagcatcgtggcacgcattcttgtaggcttatcaggcggggtggacagctccgtggcagcagccctgctcgtggagcagggccatgacgtggtgggggcctacatgaaaaactgggtgaatgacgagggcattcccggcgaatgcccgtgggagcaggatattcaggacgcgctgtccgtcgccaaaaaaatcggcattgaattccgggtcatcgacctggtggacgaataccgcgcccgcatcgtgaattacctgattgaaggctaccgcgccggatacacgcccaatccggacgtgctgtgcaaccgggaaatgaagttcggcgtctttctggattacgccctggagcaggggtttgactccgtagccaccggccactacgcccgcaggctggatacgccgcagggctccttcatcctgcgcgggcgggacccgaacaaggaccagtcctacttcctgtccctgatgcgcccggaccagacagcccgcgccgtgttccccctgggggacctgctgaagccggaggtccgcgtgctggcggacaaatacggccttcccacggcgcgcaagaaggacagccagggcatctgctttatcggccaggtgaagatgagcgacttcctgcgccactacctgccggataaacccggcaaaatcgtggatacggaggggaagacgctcggctcccacaacggcctgcacctgttcaccatgggccagaggaaaggccacggcgtcgcctcaccgcgggagggaatcgcctacgtggtggtggggaaggacgtcaaacgcaaccgcctgatcctggggtatgaagacgcatccacgcagggactgtatgcggcccatgcggtggtcggcggcatttccaatacgctggcgcccctgccctcccgcgtgatggcgcagccccgctaccgcgccaaggcggaatgggcctcctgcgaatatctggaagaaggaaaggtgcgcctgagctttgacacgcccctccgggcgctggccgtgggacaggtctgcgctttttacgacggaggcaagttgctcgggggcggtttttttgaatccatagaaccatgattgacccggaacgcaccatagccgcgcaggccaccgccgcaggacagggagccattgccgtcatccgcatgagcggtcccagctgcatggccatcctgaaacaatgcacccccgcggccttcacggaacgcctccagccgcgccgggcaacgctggcccgcattctggacgcggagggaaccgccattgaccaggcgctcatcacctggttcccggccccggccagttatacgggggaagataccgtggaaatctcctgccacggcggcatgctggtgacagaccgcctgctgaaacgcctgtaccggtgcggagcttccccggcggaaccgggcgagttcacgaagagggccttcctgaacggacgcatggacctgacccaggctgaggccgtgatggacgtgatttccgccgggagcgacctagccctgaaagccgcgcaaacccagctggacgggggcatcggctcccaggtggacgaactgaaggacagcctggttcacgtcctggcccatattgaggcctacattgattttccggatgaagatatttccccggacaccgcttccggtttgctggcgcggctccggagcatggaggaaaagctttccgggctgctgcggaccgccgagggcggccgtcttctgcgtgaaggcatccgcacggcgatcgccggaccgcccaacgtcggaaaatccagcctgctgaataccctgctggggtatgaccgggccattgtcagcaatatcgccggaaccacgcgggacacggtggaggaatccatccagctcgccgggctggctctgcggctgattgacacggcaggcgtccgggaatcttccgatgtgattgaacaggccggcatcactcgtaccaacagggcgctggaaaccgccgacctggttctggaagtggcggacgcctccgcgccccggacagaggctttccccacggccgcccgtaccgcgccccggctgctgattctgaacaagtgcgacctgggaatccacccggactgggaggccgttcccggcatccgtttttcctgcgccaccggagcaggcagaaaggaattggaagaagccatcgtccgggccttcgcttcctccctgcccggtgaaacgggcagctccctggtagccatcaacgcccggcaccagcatgaactgggcctgtgcctggagcatgtccggctggcttctgaatccatctcccggcaggagagcccggaattcacggctctggaactgagggaagccctgacgcatctgggggaaatcaccggagccgtggatacggaggacgtgctgggcgccattttttcctccttctgcctgggcaagtaaagctccggaaaatccggacagcatcattcaacaagcagcttttatatcctcatcatgcctcctcccgccgtcaaatccgtccgccaaatcatttattaccaatatgccaaaatcattgcctcttcttccggcttcggaaaggccaattacggcatgattatgagcaagtggaaggagctttgcgcagggaccatacattggtcttcctccgttcgcgaatgggtcagggaaatggaacatcccggagaatgcatttattgcggcgaaaaaaagaatttgaccacggagcatatcctgccccgcgactgcgggggagaagatatcatggataacgttgtcagggtatgcaagtcctgcaattcctccaagggcgggaaacgcctgtacgaatggaaggggctgaaggaaaaggacagccaccaccgcatcgcggaggggaaatacctgaagtacctttattcccttcacgaaaaacggggaaccctggacgtagcaaatgtgcgggaactgtgcccgcactgcaacatgcgctcctgctgcgagcgggacggtacggtggagaagctttccgtctattgcatggaagggtgcttccacaagtagcgcggattaccgtccgccgggtttcccggaaagaatctccttttcctcttcctccatggcttccggttccgcctccggggagaacaggggaatgtaggaaggcaggttccagttccagcggatggccgccaggcgcacggagagcgtgaccacgaagcccgtcacgaagcaggtggaggagtcgatcccgaagtagtaaagcaccgcgtacgccacgcctcccaggagggccgcggtggcgtacagttccccggggcggaacacgtagggaacgtttccggtgagcacgtcgcgcagcaggccgcccgccacgccggtgcagatgcccatcatcacggaaacggtgggcgtatagccgtggaggtaggatttttccgtgccgatcatgccgaagagggccagaacgatggcgtccgccacgcggatggtgcccatgggcggcgggtatttctgggccacgtaaaaggttcccaggctggtgacgacggcggccaggacaaagatttccccggagggcagcgtccagtacaccggaatgtccagcagaaggtcgcgcacggtccctccgcccagggccgccagggtgccgcagacaatcacgccgaacaggtccattttcacgcgcgaagaagcaatggatcccgccagggctccaatgatcgtgctcatgatttcacagatggagaggaacatggcggcaggaggaaggaaagaggcggattcagcagacccgtatccacggcaggcaggagtcctggctggcgcagaacagggaggtggaagccagtcccatgtcatgcagggtagcacgcatcaggctttctgccaattccggagaattgctttctgcgctcaggtgggccagcactacgtttttcagggcgtcatgggcgatgcgcctcagcaggtcgcaggcctgttcattggaaaggtgcccgtgcgtggaggcgatgcgctgcttcaacggccagggccgcttgggggtggccgccagcatgtccggatcatagtttgattccaccaccaggctgtccaccatggagaggtgttccgccacgcagccgggggcctgccccgtatcggaaatgaagcccaggctggaccgttccgtttcaaacttgaatcccaccgggtccacggcgtcatggtaggtggcaaagggggtgatgacgatatcccctattttaaaggactgccctttttcaaagtaggcccagggggcttccggcgccttttcctgaacgcacatggccgtatggcgggtggcatagacgcgcacggtgtatttcctggtgaactgatgcacgcccttcatgtggtccgtgtgttcatgggtgagcagaatggcgtccagctcctccggttccacgccggcggatttcattttatcccgcagcctggcggcgctgaacccggcatccaccagcaggacggtttcccccgccttgacgatggtggcatttcctccgctgccgctgcccaacacgcaaaactgcatcatgcgcggaatataataccggtcccggagcggcgcaagagcggatcaatgctttttttcacgacatgaacacaaagaaaaatacttttttccagtacggggttgacatttcaggtgcattaaagtgtattgaagtcactacgtagtgtacttgcatgcgatgagcagtgtatcagacaacctttttggtgcatacacgcacaagctggaccccaaaaaccggattgcgattccggctgaatggaggcctaccgaaggctgcgccctgctcctgctatccggccggcgccttgaattgccgaccgttaaagcctatacgcgggaaaaattccagcaactcattgacaagatagaagccacgcccggctacacggaagcgcagatcgacctgttcatcggcagattatatgccaactgcgtggaggccatcatcaacgcccagggcaaactactgatacccaaacaaatgtgcgaacacgcacagctcagttcctccgtccggctcgccgcgcggagaggatatttcgaattatgggaaccttctctctatgaagaagtctcccggcgtgaaaacgccaatatttccgatatcaaccaatcctacggcattctctgatctcccttcatgcccccagaccctaccattccgcccacgcatcaggcccatccctacgcaacgcttgcgctgcgcccgggctggcttgtttccggcctgggcgtcggcgccagaaccgggctgaatgcggaggttacggcttattccattgttttctgggggcacgacgcccttccggcgcaggacatgatcgcctggcagcaggagaaggcacgcatcaccgcggaaatgtccctggcgggacagaagggcgcttatggcaaattgggcgcattgtcctccagcctgaaccgggcttttgatggccatgttgagctttctttacgcgcgggcgcgggtacgcatgtccgcacggaggaggcgcaggccctggcaaatgcccttgcggcggaaacgtcctgccgcgtgctggcatggagcatctgccgcaaccatgtgcacgtgattgcggagttgacggaggagaagggggtggacgagctggtctgttcctggaaggcgcttgccccctccatgaactgggaaggcgtgtaccacacggaagccctgaaagctccggaagccgaagccaaagtggacgccctggtttccgaactgggggatgacgccgtttccgcctccgctgacgcggaaacggacggagccgtttccggcaacggttttaaccatgttacggttctgctgcatgagacggtggacatgctggcggcaggccccggcaaactgatcgtggactgtacgctcggcggcggcggccatacgggatttcttctggaacagggcgctaccgtctggggcattgaccgcgacccggacgcccgccgcgccgccgcgctgaagctggcccgcttcggctcccgtttcaaggtgctcgccggcaatttccaggatgtggaaagcatcctcgcccagcagggcgtttcccaggtggacggcctgctggcggacctcggcgtttcctcccaccagcttgataccgcctcccgcggcttttccttccgggaagacggcccgctggacatgcgcatggacacccgcgccgccttttccgcccgcaacctggtgaacgaggccccggaagaagagatcgcggacatcctctggcagttcggagaggaacgggcttcccgcgccattgcccgcgccatcgtaaaggcgcgttccctggctcccatcaccaccaccgcccagctcgcccgcgtggtggaatccgtccttccgcgcaaggggcggcagcatcccggcacccgtacgttccaggctttgagaatcgccgtcaacggggagctggacgcgctggacgcgctgctggattcctccgtgcgcctgctgggcaaggggggccgcatggccgttattaccttccacagcctggaagaccgcagggtcaagcagttcttcgacctccggagccgtccggaaatcgaccgtccggaatggccggctccgcgccccaacccggattactgcttccgcctgctttcccgcaagcccgtcactgcgggagaagaagaactttcaaccaacccccgttcccgcagcgccaagttgcgcggcgtggaaaaaatcatctgacccatctctccttcgccaccgccatgaaaagattcaaacagcgtttcaccggccaccagatcagcgtgagcatgatcatgtggctcattgccttcgcctccctcacctgcggggcgggcatcacttatgccgtgctgaaaaacgaccagatccaggtcgcgcgcgacatcaagcaaatgaacgaggagatcgcttcctgcgaactcacgaaggaatattaccgttccaagacttcctccctgaccagccgctgggccatccgcgacaggctggcccaggacaagtccaaccttcagcctatcgagccctcagccgtagaatacatttcttccgaaaacgcctcccgcattgccgcggcaggcaattaaatgcgccgagccgttcatgaccacgatcacgaagtccagatttgccagaagaagcctcgtcctgtgcggcgtggcgggcgctgcggtcatctggctgatgctgacgctggtcaacctccaactggtttccccccggaaaacgggcggagtccccagcggcggcattattgaacgggaggttctcctgccccagcgcggtcgcatcatggacgccaatgaggagatcctcaccaacaacatgcagagttccgagctgattgcggacggctaccacctgaacgatcccaagaccatcagctgggctcttgcctattccaaggccgtccactccgccttctggggagaagccgccacggacaaggagaaagagaagctcgtttccggtttccgcagcaaaatcctgggacaggcggccagcaagaaggacggcagcaaggagcacaatctggcgaaaatcctgctggaagagcctgaggacggcccggaaggggtagacatggccaggaagaagctggaagagctttatgagccggagatggtgagaaaatacgtgcaggcccatctggaatacgccgccagcgtgatcgcccccttcctgccggacatgagcgtgcaggacatcatcaacacggtggaaaaggacggggagattcccaagaagcgcatcgtcatcgccaagaacctgtccgaggaaaaagcggaactgctgcgccaggccatccagaacgcccgcgtccaagggttccggtttgagacttcttccaagcgcgtttattccgtgccggaatgcatggtgcacattctgggctacatcgcccagacgaaggacagcggtccgcggcccgtggccctttccggccttgaaaaacagctggacgaccagcttctgggccacaacggcatcagggagtaccggaaggacagccggggccgcatcatcccctccgcggattcccgtttcaaggacgccgtggacggcctgaacgttcgcctgaccgtgaacatggagtaccagacgatcgtggaggaggaattggacgccgccatttccttttacacggaccagacccacaagccccgcggctgcattatcgtcgtggagcccaagaccggcagcattctggcgatggccagccgtccccactataatttaaatacgcgcgagggcctgcaggaaggcgcctaccacttcgccgtgcagtccctgtacgaaccgggttccaccttcaagatcgtttccgtcacgtccgccgtggacagcggaaaggccacattcgataccatgatcaactgcacgccctacatggtgcccggctcccgccccgtcacggacgccccccgtttctacagcggcctgaccgtggcgggcgtgctgaaaaagtccagcaacccgggcgccttccgcattgcgctgaaatcgggctggcccacgtataaaaagtattttgacctatacggtttttcctccaagacgggcatcgacctgccgggggaaaccaacagccagtgccaggacggcagcaacttcgtcaacttctcccgcatcagcttcggctattccctgatggtctcccccttgcaggtcgccatggcctacgccgccatcgcgaatgacggcgtgcgcatgcgcccccggctggtggacggcatttacgtggacgacaagaatttccagccctccccccccgtggaagtatgccgggtcatgagcgttaaaacagcccggaacctccggaacgccctgttccacgtcacggacctggacggaaccgccaaaagggcgcggattgaaggctacaacgtggggggcaagaccggcaccgcccacaaggtgaagcccacgggcggctattttgacaaccgctataccgtctcctttgtagggatgcttccggtggaggacccggccttcgtctgcctcatcgtcattgacgatcccacctccaagcactgccaccccggcggcggcaccgtatgcgctccggtcttccagaaactggccacccgcctggcggcggccatgaacattcccaagaataccccttccgcggaggcagacaaaaaagcctcccgtgcccaagcctcttcctccccgtccaaactgccgcgcagataatcctatcatgaagctacttaccttgctcaaagaccttcccgcccatacgctcaccggctccccccaggtgaaaatctcccatctggaatgcgacagccgccgcgttctgcccggctcctgctatattgccctgaagggaacccaggcggacggccacgagttcattccggaagccatccgccgcggagcctgcgccgtcgtcgcggaaatgccctgcacgaaggaagccagggacgccggagtcagctgggtggaggtgaacgattcccgcctggccgtcagcctgatgggcgcggcctggaacggccatccctcccgccacatgaccatgataggcgtgacggggacgaacggaaaaactacgacggcctacatcgcccattccctgctgaagcagtcctggctgcgcgccgggctgatcggcaccatcgcctatgacaacggggaggaaatcaccccctccacccacaccacgcccggcccgctggagctggaacacctgctgaaggagatgtttgaaaacggctgccgcggcgtttccatggaggtatcctcccatgcgctggaccaggaacgcgtggccggcattaattttaacgtgggcattttcaccaacctgacccaggaccacctggattaccaccacaccatggagaattatttccaggccaaggcgaagttgttcgagcagatggcgcaggacaccagggcccgccgcaagcccgtggccgtcatcaacattgacgacgcctacggccgccgcctggcagaaatgttctccggccgcatggccgtcaagacctacggttccgccctgggcgcggatttccgcatgctggtgcaccacgccacggccaagggcagcgaatacgaactggaatacaagggaaaaagctacctggtgcgcgtgcccctgatcggcaaattcaatatgtacaacagcctggccgcgctggcggccgtcatctgcgccggcatcccggtacgggacgccatcgcgaacctccagaacattccgcaggttcccggcagactgcaattgttcacccaccccggaggcgcccagatcttcattgattacgcccacacgccggacgccctggaaaacgtctgcaggacgctcaaggaaatctgctcccgccgcctgattaccgtgttcggctgcggcggtgaccgggacaagggcaagcgcccgctgatgggcgccgtggccgcgcgcctgtctgacgcctgcatcgtcacttccgacaaccccaggagcgaggagcccctctccatcatcagccagattacggcgggcatgccggaaggcaggtacgccatcattccggaccgcgcccgggccatcgccacggccatcgaacaggcccggctgggggacgtcgtcctgattgcgggcaagggccatgaaaactaccaggagctttccaccggacgcatcgatttcagcgacgccaaggaagtgcggcgcaacatgttcatcaaggagagggaagagttcccgcaggcataacacatcatttcatctttcatgacctccctcacggcacacggcatctgcaacgccatcggcggaaaactggtcagcggcccctttgacagggtcgcttccggaggcgtgtgcacagacagccgcgccctgccgccccatgccgttttcttcgcgctgggaggagaaaagtttgacggcaacctgtttgccccggaggcttcccgcaccgcggcggcagtcgtcgtcagccgcgtggaggaagggatggacccctcctgcgccgtcatcctggtggaggatacgctgaaagccctccagcagctggcctcctggtggcgtgccgggctgaccctcaccgccatcggcctgaccggctccaacgggaagacctccaccaaggacctgaccgcctccgttctttcccagggactccggaccatcgccacgcagggaaacctgaacaaccacatcggcgttcccctcagcatcctccgggcttccccggcggacgaggccgccgtgtgggaaatgggcatgaaccatccgggagaactggcccccctgtgtgaaatgacacgcccgaagatcggcatcatcaccagcatcggcacttcccatattgaatacctgggctcccgggaaaacattgcccgggaaaaatgcacggtagcccgctgcctgccggaagacggcttcatgattttcccggcggactgcgattatgcggacatgatccgccggtccacccgcgccgcgtgcattgagtgcggcattgactccggaaccgtccgcgcggaaaacccggtctccacggagaatgggacgcgtttcaccctttccattcctgatttctgccgggaggtggtggaactgcccgtccacggccgccacatggtggccaatgcgcttctggccgccgccgccggctgggtggcaggtcttgcgaaggagcagatcgtctccggcctcaaccgggcgcagctcacgggcggcaggctccactgcacccggtccaacggcattctggtagtggacgatacgtataacgccaatccggattccatgcaggccgccctgcacaccgcagcggagctttcctgcaccggcaggcgctttgcggtgctgggcagaatgggggaactgggaacgttttccgaagaagggcacgcgctggtgggacgcacggcggaaaagctccgctttgactgcgtggtcagcgtgggaacggatgccgcccggattacggacgccatttctccgaactcatccaccaaaggactgaacttcggctccgcagaggaagccgccgaatggctccgcagccacacggcgccgggagacatcgtccttttcaagggcagccgccttgcccggatggagcaagtcatgaacctcacctttccgccccagtaaattttatgcattccttcattgaacagctcagccccgcgggggcgcttgcagaaccggcagggagagccctgctggcctgcctcatctcttttgtcctgacgatgatgttcgccccgcgggtaatccgcgcgctgatttccctgaaaatcggccagcccatcaggaccgcggaggaagtgcacaagctggcggaactccacggagccaaggcgggaactcccaccatgggcggcgtgctgatcgtaggctccatgacggcggctaccctgctgtgcgccagaatgaacaatcccttcatcatctcctgcctgttcgtcaccctggcgctgggactgctgggcttccgggacgactacctgaaggtggccaagaaaacctcggacggcatttccgcgcgtaaaaaactcttcatccagttcctggccgggctggcgggcgtcacgttcctgtacctgtacccggaaggcagcccccgcgtggaactgcatgactacgtctcctccctgttcattccgttctacggccaggtgaacctgccgtggtacgtttacattcccttcggcgtcgtggtggtcatgtccgcctccaatgcggtgaacctgacggacggactggacggcctcgcctccggctgctccgtcaccacgggcatctcctacgccatcattgccgccatttgcgggaactggctgatggcggattccctggacatccccttccaccccggcgcaggggaaatcagcgttttcatgatggccctggtgggcgcctgcctgggtttcctgtggcacaactgctacccggccagggtcttcatgggggataccggctccctggccctgggcggagcattcggcatggccgccgtctgcacggcgcaggagcttcttttcatcgtcatcggtggcgttttcgtcatggaggccacatccgtcgttctccaggtaggcagcttcaagctgcgccacggtaaacgcatcttcgccatggctcccatccaccaccattttgaactcaagggatggaaggaaacccaggtgattgcccgcttctggatgatcagcctcctgctggcgttcctgggccttttcctgatcaccaccgcctgacaaccacgaacatgcagctcaacaatctcaacatcgccgtcctgggagcgggaagaagcggacgcgccgcggcgcgcctcgccatgaagcatggcgcccgggtgcgcgtgtttgacgcctccccctccatcggcaactggccggaagacattccgctgcacgccgccgccacggaggaagacgggagggccttccgcgcggacctggtggtcatctcccccggcattgagacggacagcccctttgtcagggccttcgggcgggaaggcgtggaaaccatcggtgaaatggagctggcctgccgcttctaccatggccgcatcatcgccatcaccggcaccaacggaaaaaccaccaccacgtccctggtggaaaaaatcctgcttcgcgccggaaaggcggccatcgcctgcggcaattacggcgtcccgatggcggaaatcctgctccgggattccgtgccggacgtgctggcgctggaggtcagctccttccaattggaaactatccgcgatttccacccggacgtggccgtatggctcaattttgcgccggaccacatggaccgctacaagtccgtggaggattactaccacgccaagctgcacatcttcgacaaccagacggaagaagacctggccgtcgtgcgcgccggggaaaggctcccgcacctgaaagcccccgtccgcaccttcagttcggaagatccggcggcggacctttattaccgggaaccgcaggtcatggagggagacaagcccctgctgaacctggcggataccaccctgaaccagcgccacaacgcggaaaacgccatggccgccgtgctggcctgccgccacctgggcattcccgcggaaacggctgcggaagtattgaaggagttcactccccccggccaccgctgcgagaccgtccgcacgctggacggcgtgctgtggctgaacgattccaaggccacgaacctgcacgcgctggaagcagcgctgaaatcccagaattccccggtcatcctgattgccggaggcaaggacaagggactggattacctgcccctgcggcccatgctgaaggaaaaggtgcgcgcgtgcgtcgtcttcggccagattgcggaccagctccaggacgccttttcccccgtggttcccacggaaaaagcagcggacgtggcggactgcgtggccaaggcccgcgcctgcgccaggacgggagacaccgtcctgttctcccccggcacctcctcctttgacatgttcaccggctacgtccagcgcggccaggccttccgggacgcggtgaacgccctctcccccctttcctgacaacccaccagaaacccaccatcatgaaaacgaccaagacccccgatcacaatccgaccggacgcacccgtccgaaacgcaaaatgggcaccgtgctccgtgccaagctcagcagataccgcgcacgcgtctccgaatttgaagatgacgctcccagcagcaccgtcgtgcgctggctcgtcgtcctccttcttctccatcttcttgttatcggcggcgtctatgtccgcagcacctggttcaggaatacgacggagaccgtggaaatggcaaccgcccttcccgcgccgcccaccgtttcccagacgcccgttcctgcggctcccccggcggttctgccccaggctccccaggccgctcccgcggctccggtcaccatcacgcagccggaacaggtggtggacgcgcgcccgaacaggcagccggttcccgccgtgcaggaacacattccggatgccgctccggtggcaggtcctgcgcgccacatcgtgcgcacgggggatacgtgggaacggatcgcccgtgacaaccaggtggccgtcaatgacctgaaagccgtcaatcccagggtgcagcgccttgtcagcggaagcacgctcgtcattccggcacgccccggcgacaagatggcgccggaaaaaaccgccgccgcggaaacggaaccggacggcgtggcgcatatcgtgaagaagggtgagaccctctccgtaatcgcccgcaagtacaagatgaactggcgctccctccagaaattcaacaagatgaacgaccgggacgtagcacgcctcaagatcggtcaaaagatcatgattcccaagaagtaagttctttctcttcccgcccctgccgccatgtcttccaaagtctgcatgattctggtctggtttttcgtcatctgccttctggtcgtgggcctggtgatggtatccagcacggcggcctgggcggaagaaaccaagcacccgtacgagcccctgttcaagcagaccgcctttgcctgcgcggggctggtgggggccatgatcctctcccggatagattaccggatatggaggaagtatatctggtggattctggggttcgcctgcttcctgctggtgctgtgctacgtgccgggcatcgggaaggagatcaacggggaacgccgctggatcaccatcggcatgcagttccagcccagtgaatgcgccaagctctgcatgatgatggcgctggccaactggctggccctgtaccgggaccgcactacctccttctggtgggggttcgtgatgcccggcgtcatcttcggcattccgctggcgctgattctttttgaaaaggacatgggcacctccgtagcgctggccctggccgcgttctgcgtgatgttcgtggccggcacgcgcaagatttacctgggcggcgccctagcgctcgccggagcggccctgtacgttctggtgcagagcaacgccaaccgcctggaacgcttcctggcctggaaggacctggacgcccaccgcctgggcgcggggctccagcagtaccgcgcctccatcgccctgtcccgcggcggcctggacggggtgggcctgggcaacagcgcggaaaagcacggcacgcttcccttcgcccatacggacttcatcttcgccccgcttggggaggagttcggcttttacggaaccatgttcgtcctgctctgctatttcctgatgacctatgcgggcatcggcgtagccatgcagtgccgggacgcctacggccggttcctggccgtggggatcgtcgccatcatcttctgccccgccatcctgaacattgccgtggtgaccaacgccgtgcccaactccgggctgccgctgcccttcatcagcttcgggggcaccaacctggtcttcacgctggccgccctgggcatgctcaccagcattcagagattttccaccggtgcacagcccaactgtgaaatcacccgcaaagacgaacgctccattgacgtaagattatgactgaaccctctccctcgcgtcccaccctgaacatcgtgattgcctgcggcggcacgggggggcaccttttccccggcatagccgtagcccaggaacttaaaaagcgcggccacaacgtcaccctcctcatttcccagaagaaggtggatgcgcaggccagcaagaattacggcgatctcaatttccgcaccattgaggccatcgctatgcccaaaatcccgtccatgtccctgctgggcttcgggctcaggctgtacaaggccatccgtttcagccgcagccttctggacgaggtgaatgcggacgtcgtcatcggcatgggcggctttacttccttcccccccgtttacgccgcccaccgcaagggcatccgcacctacgtgcacgattccaacgccctgcccggcaaggccaaccgcatgaccgccaaatgctgcacgaacgtgttgctgggcattgaggaggccaggcactatttcaaccccgccaagtgcatcgtcaccggcaccccggtgcgccaggagatggaggaacgcagggataaggatgaatcccgggcggagctcaacctgccgaaggaccgccgcgtggccctggtgatgggcggctcccagggggccaggaacctgaattccctggtcattgaagcggcccggcagtgcgcggacctgtgcgacttcctcatcatcaccggctccgcggattttgcgcgcgtgagccagctgacggcggacatgccccatgtgcacgtcattgagttctgttccgccatggcgaccgcgtacgccgcggcggacgtggtcatttcccgttccggggcgtccagcctgacggagctggcccacatggggaaggcggccctgctggttccctacccctttgccgcggatgaccaccaggcgcacaacgcgcgcgtcttcgcggcccacggggcggcgcgcatgatgcgtgaaaacaccctcacgccggacgatattgcggcttttctgaacgaagtcttcaaggattcctccctgctggcctccatgaatgaatgtgctttacgtctggatacgcctgatgcagtatcccgcatcgccaatgtcattgaaaacacggaccatgcagccatccatgattgagactttacgcaaacgcctgatggacagggaacatccggcacgtctccacctcatcggggtggccgggtccggcatgtccggcctggcgctcatgctgatggaaatggggcaccgggtgagcggctgcgaccgggtgaccagcacggaaaccgaacggctccagagcctgggactttctttttcctgcccgcattcagcggacgccgtctccgacgcggaaatcgtcatttattccagcgccatccgggaggataatccggccctttccgccgcgcgcaaactgaacattccctgcatgcgccgcgcggaatgcctggcggccatcctgaacgggaagaagggcgtcgtggtctccggcacgcacggcaaaaccaccacctcggccctctgcgctcacctgatgcgggaaggccgcatgcgcccgtgccactatgtaggggcggaaatccccgtgctgggcaccaacgcccactggaacgaggacagcgaatacctggtggcggaaggggacgagagcgacggcacgctggtgaactacatcccggagcacagcatcgtcctcaacattgagccggaacacctggaccattacaaggacctggatgaaatcaaggccgtgtttgaccagctgtgctcccagacgcggggcaagatcatttactgccgcgcccatcccggcgcagcggacgtatgcgccggctatcccaattccgtttcctacggctggtctggtgcggattacaccgccacggacatcctggaacgccgcggccgcaccctgttcaccgtcctgaaaggggaagaggaactgggccgcgtggagctgggcattcccggacgccacaacgtgctgaattccctggctgccattgcgctggcaacggaactgggcgtggacttcccggcgataacgcgcggcctggcttccttcgccggggccaagcgccgctttgagaccaaatacctttcccccaccatccggattgtggacgattacggccaccatcccacggagatagccgccacgctccagaccgcccgctccctccagccgaaccgcctggtggtttacttccagccgcaccgctacacgcgcacccagatgctggcggacgacttcggcaaggtgctccaggcggcggacctcgtctttgtggcggacgtttaccccgccagcgaactgcccattgaaggagtgagcggccagaccatcatcgacgccatgcacaggcacggcccggtggaaacccattatcttcccgacctgggcacggcccaccacgccatcggcaacgcgctgaaacccggagacctgttcctgacgctgggggccggaaacgtccacgaatgcggcatgcgcatcgcgcgcgacctggctctgctggaggatctggaacgcaccgcgggcgaatccctggaaggcaagctgtacgaacccatgtcacgccacaccaccatgagggtgggaggctgcgcccagtactggctggagccctccaccttctccggcatgcagacagccgtcaattattgccgggacaggaacattcccgtgcacgtcattggccgcggctccaacatcatcgtcagggacggcggcctgcgcggcgccgtcatccacccctccggaggcgaattcgacgtcctggaaattcaggggaaccgcctttccgccggcgcgggagtgcggctgaaaaagctggtttccaccgccgtccagaacggcctgggcggcctggaatggatggacggcattccaggcaatgtgggaggaagcctccgcatgaacgccggggccatgggcatggacatgattaaaaacctcgtctccgtcgtctgcctggatgaagacggggaaatccgcagtcacacaaaggaggaactgaacgcccagtaccgctccatcccggacctggcccataattttgtgcttcaggccgtgtttgaagcgcagcccgccccggcggaggaaatggaacggctcctggcggcggccagggccaagcgcaagctttcccagcccgtaggagccagcgcaggctgcatcttcaagaacccggaggaaatcccggcgggcaggctcattgacgagctgggcctgaaaaacgcctgcgtgggggatgcctgcgtgtcagacgtgcacgccaatttcatcatcaaccgcggccatgccagggcgcgggacatcaccatcctgattgacatgatccggaaggaagccatggaaaaccgcggcattgacctgaaatcggaagcccaggtcatcggagaccgggaaccccagttttaacccattcattattttatttcaacatgagcactctcaagcgcgacctcaagattgcccttctccttggcggccccggagcggaacgggaagtatccctcgtctccggaaagtccgtttacggcgccctgcgccaggccgggtttaccgacgtaacggaggtggacgtacatggtccggacttccggctgccggaaggcacggaactggcctacaacatcattcacggcaccttcggcgaggacggggcccttcaagccattctggaggaacgcggcgttccgtatacgggagccggttcccgttccagcgccttgtgctttgacaagtccgaatccaagaaggtatttctggaagccggggttcccaccccccgcgcggaaatcctggactgctccggcggcatcgtgatgccgtcccttccccttcccttcgtcatcaagcctccctgcgagggctccagcgtgggcgtccacatcatccacaagcaggaagacgtgctccccgccatggaggaagccgttacccacggcaccaccgtgctggtggaggaattcattcaaggccgtgaacttacggtgggcgttctggacggggaagccctcccggtcatccacatctgcccccgctccggcttctatgacctgagcaacaagtacccgtggatgaacatgggcggaggcacggattacatctgcccggcggaccttccggaagaaatcgccgccaaggtgcaggaggccgccctgaaggcctaccgcgccgccggcgtggaggtgtacggccgcgtggacgtgctgctgcgcgaggtagacgactcccccttcgtgctggaaattaacaccattcccggcatgaccccctccagcctgctccccaaggcggctgctgccgccggctggtcctacgaggccctttgcgaaaaaatagcggaattatcgctagccaccccccggaaatagcgtaatatttgacagagggcggggagtcgcccatcccacaccccccgatgtcgcacaaagccacaacgccagtcccccgttccgccaaaaggccggaaatgctcctgctggaacgggaggccagaaaagaaaccattgagcgcaagggcaggaactaccgtttctggctcttccggcgcaagctgtaccacatcgtcaccgtttacacgctcatcttcggccttatcggggccatcgtcttcctctggacggattacatcctcaagtacgactggctctccatcgacaccgtcacgttgaaaagcaacggcattttcaactccgagcaggctttcgccgtcatggggataggcccgaaggacaacatcttttccatggatgccccggaactggaacagcggctggaaaaatgcccggccatccgccgggcggccgtcaagcgccagatatcctccaatcccacgctgctggtggacattgacgcgcgcatccccgtggcatggattgactgcccggaactgggcgtccacccgggagacgccaaatacggcgttctggcggacaaggagggcgtcattttcccctgtatggagcaggtccacatgccctacatccagggcaggcacatgccctccgtcacgctcaggccgcccagctccggccagctcagctacggagtcggcatccgggagctggaagcgcccatgaagctgattgagctgctctccggcacggtgacggaatacctgcccagcatcgtctccatcaccacgcccaacgactggtccttctgcgtgcgcttctccaacgactgccaggccaccttcagccattacggcctggagcaccaggtggaaaaactgtcccgcgctctccggcacgcacgccagacgcaccggaaaatcagcgccatcaacctgattccggagcacaatatccccgtcattttcgacgattcctacgaggacatcccccttgcggaaccgattgaggaatgacgccgtgccggcgtcccctcccggaagcggtttttccccgttcccggccttctcccgggaacgttctcccatattttcctcaattcctcccgagcgaaacacctggttttcacaggttttcccccatgtcagaattctattctttctcaacgggaaatgagatcgtgaagacctattgaacacttgccaataacgccgcgcaagctatactttccacgatattatgagcaacgaaacacctttatcacccgaagcggaaaaactggcagcggcccgcaagcgcaaccttgacctggccctctcccaaatccagaaagacttcggagaaaacgccatcatgcgccttggagacaacgtcaagatggaagtggacgtcatccccaccggcaatcttctcattgaccgcgcgctgggcgtgggcggcttcgcccgcggccgcatcgtggaaatctacggaccggaatcctccggtaaaaccaccctgaccctgacggccatcgcccaggcccagaaagccggcggcctggccgcgttcattgacgtggaacacgccctggacccgcagtacgccgcccgcctgggcgtcaacctggacgacctgctggtctcccagccgagctccggggaagaagccctgcaaatctgcgaagccctggtgcgttccaattccattgacgtcatcgtggtggactccgtggccgcgctggtcaccaagcaggagctggaaggcgaaataggagactccacggtgggcgcccaggcgcgcctgatgtccgccgccctccgcaagctcaccagcttcatctccaaggcccgcaccgtctgcgtcttcaccaaccagatccgtgaaaaaatcggcgtcatgttcggcaacccggaaaccactcccggcggacgcgccctgaaattctacgcttccgtgcgcgtggacatccgccgcatcggccagatcaaggccagcgacggctccgtagccggaaaccgcaccaagatcaaggtggtcaagaacaaggtggcgccccccttcacggaatgcgagttcgacatcatgtacaatgaaggcatctcctccgtgggaagcctgctggacctggcgatggagtatgacatcatccagaagcgcggctcctggatcagctataacggcagccagatcgcccagggcagggacgccgcgaaggaagccctcaagtccaaccctgacctgtacaaggaaatcgaagaactggtcaaggccaagatggacgagaaggcggccaaataatccggctccttccctgttcccactcattcaaggcggctcccccttccgggagccgccttttccctttccggaggcaggcgcaaaagaatctttcacggaaacttttctcttgtgcgtcatgaaaaatccgttagtctggacgcgatatcgtcctatgtatccgacctctcgcacatcatttgcagccgtgctcggcgttttgggcatgtttctgctgacgctgtccacggccttcggatggaacccggaaaccatcaacggcgtgcagtacattccgatgtccgaggtgcgcacccattacaaactgacacgggaacgcacggaaggacggcagaaagtttacgaagtgccggaaaagatccagatacgcatgcaggcgcacagccaggacatgttcatgaacaacatgaagttcgtgctttcctatcccgtggcggaccatccgtccaaggggctgatggtctccaacatggacctgcacaaaatcattgacccggtcctgcgccccacttacatcgccaaccgccgcagcttcaatacggtagtcattgaccccggccacggcggccatgacagcggcacgcgcaaccgcatcagcagggaggcggacatcaacctctccgtcgccaaaaaactgcgggaccgtctcaagggcatgggctaccaggtggtgatgacccgtgacacggacaacttcattaccctccaggaccgcgtccgcatcgccaacaggcacagcaacgccatcttcatcagcatccacttcaatgacggcggcccctccgcccgcggggtggaaaccttcacgctggcccctgcgggcacttcctcctccatgtcccgcaacatccgccaggacgccctccagggcaactcccaggacagcatgaacatcgccctggctacagccgtgcaggggcacatgctgaaagggccgctcgccatcaaggaaggcatctccatggttgaccggggcatcaagcgcgcccgctattccgtgctgtgcaccatcaagcacccagccattctggtggaaggcggattcatgtccaacccgcaggaagctctgctcatctccacggagcgctaccagaacttcatggcctcctccctggccgccgccgtgcgccagtaccgcaccgctctgggccagcaggtgcgcagaacgcgttaagccccgcacttaccgggggttgcccctccgcagcatgaacatcatccgcattcccggcctggcagactatcaggaaaccctggaacttcaggaacaactggtccgggcccatcaggaagacccggaacgggaagatgacctgcttctgctggaacatgccggggtttataccatcgggcgcacgcgcgaccacgccagcctgcaccccggttccgcgctccccttccccgttcatgaaatcaaccgtggcgggcaggccacctaccacggccccggccagctcgtagggtaccccatcacggatttgaaccgctgcggcagggacctgcacaactacgtcaccgccctggaaaacgccttgattgaagcttgcgccaaattcggcgtacaggcccgcatccgggaaggtttggtgggcgtatgggtggaggaccgcaaaatagcctccatcggcgtaggggtgaaaaaatggatcgccatgcacggcttcgccttcaacgtgacccgcgaatccctgccccccttccaggcaatcactccgtgcggcatccagggcgtgcagatgacctgcctggaacaggaaatgccggaatccgggcagaaggacgacctgctggaccggttcggaaacgcttttgcaacactgtggaaggaaaaaattcaccggaattcaaaaggtgcagagtgtgccggggagcatgaaaaatccttcttcccttgaagacggaaatgcgccaaaggctgggaagcggccatttcagaccatgaatgcaggggaaatgttcaaaaaaacacttcctgtaagacacagaccgtgtcagcaatacgtccttgcatcttgacgcggttcccgaacggacggatgcttataccagttatggggaaaacacttttccaaaaaatctgggacgctcattccgtcggcatcctgccggacggaagaacgcaaatgttcatcgctacacatctgctgcatgaagtcacctctccgcaggctttcggaatggtccgggacctgggcctaaccgtgcgtcacccggaacgcacctttgccaccgtggaccacatcatccccacggacaaccaggcggaaccgttcgcggacgctacggctgacgccatgatcaaggaactgcgccggaactgcgcggaaaacggcatccgctttttcgacctccccaccggcctccagggcatcgtgcacatggtaggcccggaactcggcatcacccagccgggcatgaccatcgtgtgcggggactcccacacggctacgcacggcgcgttcggctccattgccatgggcatcggcaccacgcaggtgcgcgacgtgctggctacgcagaccatggccctcagcccgctcaaggtgcgccgcatcaacgtgaacgggaaactggcccccggcgtgcgcgccaaggatgtggccctgcacatcatcggccttctgggcgccaagggcggcctgggcttcgcctatgaatacggcggcaacgtaatagacgccatgagcatggacgaacgcatgaccctctgcaacatgtccattgaaggcgcggcccgctgcggctacgtgaaccccgaccagaccacggtggaatacatcaagggccgtctgttcgcccccaccgacgcggactgggacaaggccgtggaacgctggttgagcttcgcttccgatgcggacgcagagtacgacgagatcgtggagattgacggagccgccattgaaccgacgctgacatggggcatttccccggaccagaacacgggcatcagcggcagcacgcccaacccctcctccgccaggaacgacgacgaacggaagatgatcaatgaggcgctggaatacatgaaattccccgcggacatgcccctcaagggactgccggtgcaggtgtgcttcgtaggctcctgcaccaatggccgcatctcggatttccgggaagtagccgcccttatcaaggggcgccatgtggctcccggcatccgggccctggccgttcccggctcccagatgactgccaggcagtgtgaagaggaaggcatcgcggacattttccgtgaagccggctttgaatggcgcctggcgggctgctccatgtgcctggccatgaatccggacaagctccagggggaccagctctgcgccagttcctccaaccggaacttcaagggccgccagggaagccccaccgggcgcaccctgctgatgagccccgccatggtggccgccgccgccctgaccgggaaggtctccgacgcgcgcgacgtgttttccctgaattaactttccaactttttcctttatgtctctgaccaaattcacctccatcaccggcacctgcgttcccgttcccggaccggacatggacacggaccgcatcatcccctcccgcttcctcaaatgcatcacgtttgacgagctggcgggagtcatgttctgggacgaacgctttgacgaaaacggacagtccaaatcccatccggtggacgatccccgcttcaagggggcttccatcatcctgggcggctccaacttcggctgcggttcctcccgcgaacacgctccgcaaaccatcaaacgctccggcatcaaagccgtcatcgcggaatcctttgcggaaatcttcttcggcaacagcaccggcatcggcctcccttgcgtgtgcgcgtccgcggatgacattgccgcactgacccggtacatttccgatcatccggaaacggaagtgacgatcgacctcctgaacatgacagcctcctggaaggaaggttccttccccatccggatgccggcggaagcccgtgaagccctgagccggggccgctgggattccattgcagaactgcttgtcaacatggatgccgtggaaaagaaaaatgcggaactgccccaggtaacagcctcctgctgattcaacattgacctctccctacccccctctatcccccacctccccatatgattttcagaattacagactacgtccactacggcacgctggacaaccgtgaacgcggaaccgtcaagcttgcgctgcagcttatggggatgccccatccggtgaatatcaccctgcagggggactgcctccaggatctggccggatgcctggtcgatttcaggaacccctccccccggatgctccctgcggaacttacccagctcccggaaaacatccggggcgtggcgggggacatgacggccagccgccgcatgcccgtcaaggggaagaaaaccatggaaaactccctgtacctggaatggttcaccagccaccacgacatggtgctgctggaaagcacggccttttccatcaaggtctccctccccgaatggatcatggattcctgcgaggaacaggttcagatcatggcgaaccagcagatgctgcgcacccaggtgaaggaatggtccaaaacctatgccaatacccaggaagacggcaacctgcccgaccaccactgggacaagcgcctgcgggaggcggaagccatcgccatcgcctaccaggaagtgttccagaaatacaggctgaaccccaccggagacatccgcctggcctttgtgatgggctgggacgacgtgcttgacaacatcgcccagtcggaggaaacgggcactccgtgttcctgcaaaagcaccggcatgctcagcctctttgacatcctcaacgaacaggaggcccaggaggtgcagtcctgcatgttccaccccctcttccagcaggtcatggagctgacggacctgtgccagcgccagttcagccgggagatcaacaaatcccagaggaaccggacggaaccgccggaacccctgaaccagattttttactgcatccgctacatcaccccgcgcattctctcctgcctgctccaggagaaggaaaacgatgcggactactgcaccatggccgcccgcatggccctgtgcgtggaacagacgcgccagacggtagccgcgctggacatccgccgcagccaggtagacgacgaggtgacggaacgtttttcttccttgctggaggaagtcaactccttccaggaaagcctggcaacccaaagccggaaaagcaatctataaccaacttactttcacaacattacctcttcactacagaccaccatgcacttccatacctgcctccaaggactgtgtgcagtcctggccgccgccgctttttcctacgcggatgaaccggccgtttccatttcagacttcggggtggacaaggtcatgtccggccccgtcgtttccatcaatgaccaatacaagggagtcgtgaagatcgaagtggattccctgacgccggactacgccactccatgggatacgggccgctaccagggcggcatcggcaccggcttcctgatcggggaaaacgccttcatgacgaacgcccatgtggtcagcaacgcggaacgcatttacatctccatgtacggggattcccgcaaaattcccgccagggtcaaattcatcgcccatgatgcggacctggccctgctggaagcggacgaccccaagcccttcaagggcatccggccttttgaattcagcaagaacctgccccacctggaagacgaggtgagggtgatcggctaccccatcggcggcaacaggctttccgtcacgcgcggcgtagtctcccgcatcgacttcaccacatatgcccacccccgcaacacggaacacctgaccatccaggtggacgccgccatcaatccgggcaacagcgggggccccgccctgatgggggacaaagtcatcggcgtagccttccagggcctgaacaacgccaacaacacgggctacgtgattcccacgcccgtcatccgccactttctggaggacatcaaggacggcgtctatgacggctacgtggacatgggcatccaggccgcgcccatcctgaatcccgccatgcgcaaggcgttcggcctgccggacgacgagaagggcgtcctgatcggcaaagtgctcaagggctcctccgccgatggagtgctccgcaacggggacctgctgatgaaggtggacggctacgacgtggacagctccgccatgattgagctggacggccagaaaatcagcatgaaagagctcattgaacgctgcttcaaggatgaccggctcccgctggatatcatccgcgacggcaagcccatgaaggtggagatggtgatgaagccctctctctccaaggatctgctgatggcggaatacgacaagatgccccgctatatcgtcttcggcggcctggtgttccagcccatccagcgcaatgtgcttgcggcggcggacatctccatgctggacgtcgccctggatatccgggattaccaggaagacggcggctgcgtggaccatgaagacatggtaatcatcaccaaggtgctggacgatgaagtgaacgcgcgcctgtccggctccatctccaacgccatcgtggaaaaaatcaacggcgtgaaggtcaagggcctcacccacgcctacgaactcctttatccgaagaatatgccggaatacgtgattattgaactgaaaaacggggaacgccccctgatctttgaaggcaaggccatggaggcggccaacaagcgcatctccaaaacctacaacatcccgaaaaacgcccgtctggacagcgccattcccggccgccagcctgaccggaacaccaaccccgcccgttaaccgccatgaaaattctttcccttttcgccctcggttccctgattctgctcggcggctgccagccgcgcgaagccggacgaaccgctcccgaaccccagcccgggcagcagccggaaacaccgcctgaacaggtggaggaaacggccgctccggcgcagctcccttctcccaccaactccatggtaggcattaacgccaccaaccagggctatgccatggtccagccgtggagcaaggaaaacccggcgtacagccagggcttcggcatttacctgggggacggcaatattctgacggcggccaacatcgtttattccgccagcttcgtggaagtgacctccgcggacggctcccaaacggttcccgtgaccgtgaccgcctttgacccggaagccaatcttgccctgctgcgcctgaaaaacgaggcagacgccgccttcctggacaagctggtgcccgtcacgctggggaacgccccgcgcctgggcgacaaggtgaccttctggcagttcaatgacgacggcctccccatcactacgtccggaacccttctggcaacggaaagctccagccctttcaccaacagcgaaccttttgtcctgtacaatgtcaaatcctccgtcacgcctctgaaaggcggcgcaggcaaccccatcatgagggataataaactggtggctctcagcgccagctgcgatccttccgcccagaaggcgctggccgtgacccataccatgatttcccggttcctccaacaggcccggtccggcaattacaccggcttcccggcggacggcacccaggtcacggagctgacggaccccgttttccgcaagttcctgggccttccggaaaccggcggcggcttttacgtggtgaaactgcctgtctacggttccttttacaaggcaggcgtgcgtcccggagacgtggtggaaagcgtcaacggcattccgctggacagcaaaggcctgatcagggaccccgcgctgggccccgtttccgccaacgtcctgttccgtgactccgccatgccgggggacaccatcacgctgggcatccgccgcaaggataaggacggcgtcagccagcccatgacgctggatgtcaagcttgaccggagcgcgctggagggggatctgatcaatccggccccctttatttccaatcccccctaccgcatttacggaggtctggtgttcgtccccctgacgggagccctgatgagggaaatcaataagctcagcaagaaccgcccccctctcaacctgctggaagctattcagaaaaaggaagacatccggaaaaaaggcgtggatgaaatcgtggtcttcctgatggcgctgcccacccaggccacgctgggctatgcccagatgaactcctccattgtggaaaaagtgaacggcgtccaggtaaagagcctcaagcacctcaaccagcttctggacctgcccgctcccggcggcacgcaccgcattgaggtggcccagcagccgtacaccatgtacatgtcccagaaagaggccgccaaggcggaccgcttcatccagatgagggctgttcccgtgctccgcagggattaggaaagccgcgagccattccattgcattccttctgaaatgtcccttcatacgctgaatatccggctggattttccctatagaacgggctttacccacggagccttccgtccggaaaacgatgcgctggccagcctgatggagcagaggcccggaggccgcgtcctcgtcctcatggaggaagggctggaacggttttatccgcagctcccggcggacatcgaccgttattttgaaaagaacgccggagaactggcctatgccggctgccgttccgttccgggcggggaagcggccaaaaccggctttgccgcgtgggaaaaggccctccgccacattgtggaagcgggcatcgaccgccattcctacatcattgccgtgggaggcggggcgtttctggacgtagcgggctttgccgccgccaccgcccaccgcggcatccggctgctgcgcgtgcccaccaccaccctttcccaggcggattccggcgtaggcgtcaaaaacggaattaacttcatggggcagaagaactacctgggcaccttcgccgtagcctgggccacgcttaacgacttcctgttccttcattcccagcccctctcccttaaaagggccggcctggcggaagtggtgaaggtggccgtggtaaaagacgcctccttctttgactggctggaaacgaacgccgacgcgctggccgcctgcgagcgggacgcgctggaatatgccgtggagcgttccgcgctgctgcacgccgctcacatcgccggaggtggagacgcctttgaattgggttccagccgccccctggacttcggacactgggccgcccattacatggaaaccatgtccggctacacgctgggccatgcggaagccgtttccgtgggcatgtgcctggatatcctttattccgtcaggaagggatggctgcctgctgcggaggcggaaagaatcgtctccgtactgaaagccctgggactgcccgtgttccaccctctgctctcccgcaggacggaggatggcgcatgcgaagtgctgaagggcctggaagccttccgtgagcaccttggcggccatttgacggtattgatgcttaccgggataggccggggaaaggacgtccatgaaatagacgccgcgctaatggaggaatgcatccgggaaatgcaggaggccgcccgctgctccggccaggaataggggcctttcccttgttgccttcctccttttatttggagttcaggtaatccaggatcatccggacctccgccttgattccgttgagaatcgctccgtcgtccgccttgaatccgggattgtgattcgcagggccgtccccggaaccgatggtcatgaaataagtgggcgctacctgcgcataataggagaaatcctcactggccggtattctgggagaatcaaaaacgttcttctcacccacggcttcaacggccgccttcttcgccagttcccgcagggcagcattattctggatggacggatagcccagaacgtaatccagcttgtactgcgctccattggccttgcatacatggtcgatgacggaccgggtgcgttcttccagcagtttgcgggtttccggcgttacggaacggatggaggctcccagctccgctttgtccggaatgacgttgggagcgttgccggactgggattttcccacggtgatcacggccatgtccccgggcgtcgcattgcgggagacgaccgtttgcagtgccatcacgatttcagagcccgtgacgatggggtccacgcccagctgcggcatggagccatgggaacccttcccctgaatggtaaggaaaaaaccgtccgacgaggaagaggcggcccccgccggcagaatgccgatggacccggcaggttcattgggcatcacatgcgcaccgaagatggcgtctacgcctttgagaactccgctcttgatgatcggaagggcgcccccgggcgatttttcctccccgggctggaaaatgaaatacaccgtgccgggcaattccttctgcatggaggcaagaaccttggctgttcccagcagcatggccgtgtgcatgtcatgcccgcaggcatggcttacgcccggtgttttgctggcaaaggaaaatcctgtctcctcctgcacgggaagcgcgtccatgtccgcccggaagccgacggttttcccgggctttccgccgcgcagaatgccgaccacggaggtcttcgtaggccgcagaatttcaatgtggccgaacgaggcaagcaggtccgccacataattgctcgtcttgtattcttcaaaagacaattccggattctcatggatatggtgccgccactccacggcgtccctggcggcgctctgcacctccggttgctgcgccatggccgaaaaagtctggagaagaaggaccagcaaggtcaacaatgatatttgcatgtttttaaaacgggaaggactgtttttagtcagacaacgcgcaacgactttcattccataaaactgtgccatcatttcagaattttcaaagattaaacataaaccctgccaataacctccgtaaaatcgaaccaatcactccttgcaggttctccacctttgagctttcatgaaattaaatataaattattgaatttatttatatgatgatttcaaaagagataagaaaaagtatgggagagttgaaaataaaaaactttgtcttcctgacctcagtaacaagaaataactacaaatccatattattcgaattctagagtgtacttttaacaacaaaaaatcggcaaaagaaaccatcaccgttttcgtccaatctaacaatacctcaaaagttgaaatcatgttcactctaaacacggattccatctataccctattcaagatttctggaaattaatcagaagcagtgtgaccaaccataaatagacgaaagggtggaaccttaaatatccggaagggtcaggaggtgggaaaggaaagggtaaagtgtcccaaatgggacactattttttttcaggctcgcgggtgatgaaacgcatgagttccgcgtcaaagtgaagcggaacgtccccggtggggccgttgcggtttttggcgaggtgaaggctggcctgtccggcgagttgttgccgctggtcctcgtcctcggcgtagtagtcggaacggtaaagcaagcctatcatgtccgcgtcctgctcaatggaaccggactcgcgcaggtcggacatacgggggacgcccacgctatttcccgcgcgcgtctccggtccacggttaagctgggccaggacgatgaccggaacctttaattcctttgccagggctttcaggcccgcggatatttccgcgacttcgcgttcccggctgttggcggcctgcctggacgtgggtcccatgacgacgacggaaagcacggagtatgacaatttgggaagaacgattgccacgacggatgttcttggacgcgtgactcggactgaatacagcgaagacggccttaccaccacggttaccactccagcaggggccactctggttaccaaaacctattacgacggcactgtcattctggagggaggaaccggccagcgcgaaatggagaccaggctggaattgacttcggaaggcatcctgaccacgaccttgtccaagggaattgtgctgttgcggtctctggaaaacggcttcggtcaaaccgtccggcaggaacagcccaatacgaagggagggttcatcgtcaccagtaatacatacaatgccaaggggcaaccggttcgttcccagacggaagacatggcctctacagtcaccgtctacaatgaactgggacacgccgtgaggcggaccgtccagctggacgacctccatccggatgatccctctagaaacagagtctcggaaaactcctcctgttaccggctccgggaagacggcgtctaccaggtgcagacttccaccacctgcaacgccgacggattccccctcacccagaccacggaaaacatggtttccagactcagcgctgtactggaaaacaaatccatcaccacggacgtctacggacagcagagcgtacaatggacggagtacactgttccaaccaagcgcacccggttcagccgcattcccacttcaaacatggtagccgagtctcttgtcgtagacgggtttgggaccaatcagaccgaccactccggaatctgttccatccagcggcgttcctgcacctctacaggggtgattctggaaaaaaccgatggccgcggcaacaccactatggaggaaacggatcttgcaggacgcccggttaagactactggtcctgcgggccatgtcaccaccaccagctactcgtcctgctgtgaccatcctgcctgcatcaccgacgctttgggaggaacaacctgttattcctacgacatacgcggcagaaagacggccgaatatggcaccgccattcagccggcctgcttcgcctacgacgaagccgaccgcatggtggccctgactaccttccgtgcaaacgaaggcgacatcacttccgatccttccggccgaaccgacggagacaccaccacctggctctatgacgaggccacggggctggaattgaaaaagacttatgccgacggttcctgtgtttccagaacctatgacgagctcaaccgtcaggagacacttgtcaaagccagggggcttgtcataacgtataagtatgctccctttacaggagaactcatctcggtttcctacagcgatggaacttctccctggatcttttcatccaaccatctggggcagataatctccgtctatgacgcttcgggtctcagggaattttcctatgacagctacggaaggatgattcaggacacttcctttggacaggtggaaagttctcttcaagaagaatacgatgcccaggggcgttccaacggataccgcttgatgctcggcacacgcaccgtgcagcactcccatcttgactacgattccaaaggcggcatgattgggatgaatctggaaggactgaagtcttcttttacctggcggtacgatcaaaccaccggcttcctccaccatctcacctaccccaacggcatggtccgctgcaatacctaccatcccacactcaacctcgtaaccgctatcggttacaggaagggagcggatggcgaattggcggccggccacgaatacgactacgacgcgctgatgcgtcctactcaacgacgggacttatgggatgctgccactcccgcgacgataagagattttacctacaacagccgcagtgaactgctggaagaccgcatcagccggggaggaagctttgcgtactgctatgacaacatcggcaaccgcaagaccgcccgtgaactggagaaggaagtagcctacgaatccaacccgctcaaccagtacacggagattgccggggaaggagaagattttacccccgtctacgatgccgacggcaaccagacccgcatcaggacctcaacgggcatctgggaaatctcctacgacgccaatgaccgccccgtcgtcttcaccagccaggatggcagaacgtccattacctgcggctacgactaccggggaaggcgcttcgagaagaaggtcaccgtcaatggggcagtatccagccactcccggttcctgtaccgggattatctgcaggtagccgaactggatttgatgcagcctgagcctatgcttataaagagctacctgttggatccaacggaaccgacggcaacgcgcatcctgatgatgacatgctggcaggaaaacggaatgaaagtaaaagagcatctctacttcatgcacgatgccttgaagaacgttacttccatttttgacggacaacagacgagaagagctcgttacgagtatgctccttttggtagccttctcaccgctaaggaagacatggctcaagagaacaagttcaggttttcctgcgagtatgcagatgacgaattggggcttgtctactacaattaccgccacctcaatcccgcagacggcaggtggatcaaccgcgatcccattcaggaacaaggaggttggaatttgtactcatttattaataatagtattaatatagaggcggatttattaggattgagctccattgaattggaattaggagatgttaaagaaattgtgacaaagaaatataatctttcttttagtgatcctggtcatgacgaaatcatagataattttattattaatggactcggtcctaatggaagagctgtatttgcagcagttatgggatttgttagtttaagatattggaatattgatataatgaaaatttatactcattttttggcaggaagaggaactgattatacatatgatcctaataaaatacccaaaaaaccagagatgtatgctgttagaaaagccattgcttttgtgaaggaagatcctaaaaatagatgcaataagaatattagaatgaaaaattggtctctggcccattccaaagaaaatgatatgctatatattttaggagattatagttatattgttggaggtattgttgataataaatttaattttaaatattcattgtacatatatgatatatatgatatatatgattttgattttcgatctttagaaggaacatggaaagaaaaaatggctaagtgttttagaaatgtagcttgttttgtttccggtaaaatacctgaatttcaattcaattctaagaattttattatcaaaggtgtaaaacaagatgaatataatctatcatcaaataaatgaatacaaaaaatgttataacctggttcgttcctattattttatttataattaatatatgtgtcacatatattctgccacaattttataataaaaataatgataggcaattaggttatttgattttctatttaattttagttattttaatttttctattttgctggatatattctctcttctcaaatagaaaaaatctactgatattttttgttgtttctattttttacttcttttttatatgtataatgtttttattaatttttccgtttctttaaaattatattgatattttaataatattatcaattcgagatttaatgtctttaaaacgttcgaaaagatacaactttccgaagggttttttgtaaatttgtattagaagaatactggtcagacatactggttacagacaaaaatatcaacgaaatcaacaaacgactttcagacatgagtcaaatatgcggatatgaaattaaaataactttagaattccatgtcgaatttacggaccgcatcatctatcctgaacaattttacggcgaccattattacaggcctaaatacaataaaatcctccattccattctaaaaataattggcatcagcatacctttggaacccatgcaacattcccgttttttccaaaacaataacgctggaccggacatatcattatagtagtggaaatatgacccaatccccacttaaccattttaacctttaattgtcatgatattctggttaaaaaagaatatgccttattacctaatgacgaatggaaatgagagtaatgtaaaattctcaaattactgaccaggattttatgactacaccgaactttctttatctgccatttggtgatgcaggacagtctgagcacttcccttttgctgatcgttggaaaggagatagatggaacgagcatattcattgacaggaatccctccccccccttcttttttcttccattcacctacagccgcggcactgcggcaagcaacgcctgggtgtactcgtgggagggggaggaaaaaacttcgtccgcctccccgtattccacgatgcggcccttgcgcatcacggcaatacggtccgcaatgtaatgaaccacggacaaatcatgggaaatgaagatcatggtcaggttcaagtcgcgggccagagcgatgagaaggttcaaaatctgggactggatggagacgtccagcgcagaaacgggttcatccgcaatgaccagccggggttccggagccaaggcacgcgcgatggctacgcgctggcgctggcctccggaaaattcatggggatacttgcgcatcagggagggattcaggcccaccctttccatcagttccgccacctcgtccctcatctgtgagaaagatcttttgcggctgcggcattccaacgcctccttcaacgtcgcatacaccgtgaaacggggattcagggaagcgtaggggtcctggaaaatcatttgaaaatccggacggcgcttcctgacctcggaggcggaaagagccgtcagttcctctccttccagaaaaatgcgtccctccgtaggcttctggagcagcatcaccgtgcgggacagagtggacttgccacagccggactcccctaccagcccaaggatttctcctttctccacggacagggacaccccgtccaccgccaccacagacgccggtttgcgggaggagagcagcccctgcaccgcaggaaagacaacgctcacatgatccagttccagaaaagccataccatcactctaacaagcctcctgaggcaaaacaagaccccaaccgtgccagctccgccaatatcaagacatccacgcgcatctcccattcatgccttccccaaaaaacactggggccggcctgaaaaatacgcaggaaaaatctagtctgtttttactaccgccgcgtcctgtaccaatagatgcccttctaccgaaaacaactttacttctccttctcatctttgccgcaggatgaacggacaaggaaggaaagaagagctgccccggcatctccaaggagagccgctattccggaaaaaaccggaccaaaaatgaaaatcagccccgactgggcatcgcgcatatcttccggagtcacccgggaccaaaagagttcatagtaacacacgaggccgataacaacaaaagaagttgtttcccatttccaccgtctattggtctttttgaagaaccacaacaccgcaaggaaataccaaggcccccacacaaggccaaagacattcctcaacacaagagcgctccagaaaccagctaccacggtggaggcaataatcagcagcaggaccggatcttttcttccccgcacattttgatgacccatatccggactcccggtttctccatgcatatggtttatgaataaatctttaatggatccatctcaagcaaaaaagagccgttccccgcgaagggaacggctcctgagattgatgctgccgcggagcttacgcgccgagctggtagcggacgaaggagacgacggagacgtcatcgccgagttccttgccgacctgcttgagcagggcgtccaccgtgacgttgggatccttaacaaatccctggttcagcaggcaggactgggcgtacagggccttcagcttgccgggaagaatcttttccagcaggtgttcgggcttgccttcctggatgagctgctgcttggcgatttcctgttcctcagccacgaaggcggggtccaggctgtcggagctgacgctcttgggagcggcggcggcaatgtgcagggtcaggtccttggcaagagccttgaacgcgtcagacttgacggtttcttccttgccggccttgatagacagcagaacgccaaccttgccgcccatgtggatgtaggagaccacagcgccggagccgtccaccgtgaggcgggcgaacttgcgcagagccatgttttcaccgatggagctgcacatggccttgatgtattcttccgtagtgccttcgggcatggcaacctggagggcttcctccagcgtggaggccttggaatccatgagagccttggcaacatcgttcaccaggccctggaacttgtcgcccttggcgcagaagtccgtttcacagttgagttcaaggatgatgccggagcagccgcagggagccacggcggcgcggatcacgccttccttggcatcgcggtcagccttggcggcagccttggcaatgcccttttcgcgaagatacttcacagcggcttccatgtcgccgttgcattcgttgagggctttcttgcaatccatcatgccggcgtccgttttgtcgcggagggccttgacgagagctgcagtaatttctgccatagtgtttctgttctttctaaatgggttggtttaggcttcggcgggagcgcccttgccttcgttgatggccttgacaatgcagtcaaggaccagacggatggaacggacggcgtcgtcgttgccgggaatcgggaaatcgatttccttcgggtcggcgttggtgtcaaccagaacgcagacgggaatgttcagacggtgggcttcgcggatggcgatgtcttcatgatcggcgccgatggctaccatggcgtccggagcgccgcccatgttgcggatgccctgaaggttgcgttccagcttctggcgttcgcggtccagagcggccagttccttcttggacatgctcttgaattccggggtcttttcaatcccttcaaggtaggaaaggcgttcgatgctcttgcggatcgtgctcatgttggtgagcatgccgcccagccagcgatggttgacgtagtactgaccagtggcttccgcggcttcgcggacggcttcctgggcctggcgcttgcagccgacgaagaggatcttcttgttgcggcgtgccagatcggccaggaaggagcaagccttgtccaggcatttttccgtttcttcaaggttgatgatatggataccggccttgtccttgagaaggtacttcttcatgctggggtgccatttgcgggtctggtggcccaaatgaacaccggcttcaaccatctggttaatcagatcattaatcatatatgtatgtaggtggctttccttgcggcaggaaaagcggtttttagggacttcgacgctttctacccctccgatccccattgttcaggttgcgccgaatcacgcgagggacaaataatatacttcacgatgcccttcttgtcaaagcataaatcattgatttacgcaaccattccgccatccgcggcatcccgccggaggagcgcctccgcagcggctttcatcccctgcctgatacttatcgtataaaaaacaggaacatgccgcaaaacagtcttggaaaaaacatggaagaggcgttccatgcgggcgttccggatgaccaagaccctgacaagcggcaatcccgccaaattgattttcctgtttaccattcccctgctgatcggcaacctgttccagcagttttacaacatggcggacaccctgatcgtgggccgcacgctgggcgtggaagccctggccgccgtgggctgcacaggcggcctgatgtttttcatcctcggcttcgtcatcggattcacggcggggctggctatcatcacggcccagcgctttggagcgggccgcaggcgggcggtgcggcgcagctttgccgtctgcatcgtcctgagttccatcatgaccgtcctgctgaccgccgtcagcgtcgccttcgctcgtcccgttctggaactgctgcaaactcctccggaaatcctggaggcggcccacgcctacatcatcgtcatttcctggggcatcggcgcagccatgctgttcaacctcctctccaacgttctccgcgccctcggggacagccggacgcccctctatttcctggttctggcctgcgtactgaacattgcgctggacctggcgctgatcctgcggttcggcatgggacccgcgggggctgccgtcgccaccgtagcctcccaactggttgcgggcctctgctgcaccgcctacgtttttaaaaggtttcccattctccggctgaccagggcggactggaacatgagccgccgctacctctgggcgcatatccgcgtggcccttcccatggggttccaggcatccatcatcgccattggcgccattctggtgcagtttgccctcaaccggctgggagcgcagtcagtagcggctttcagcgcggcccagaaaatcgacatggtggcgacgctgcccatgatgtccttcggcatcacgatggctacgtacgtggcccagaattacggagccaggaatctggagcgcatccgccggggcgttctccagtgcaacctgatgtccgtggggttcagcatcgccgtagccgccgccaatattgcctggggaccggaactgatccggctgttcgtgggagacggggagaaggaagtcgtcagcctggcccagacctacctgaacatcaatgcctccatgtactgggtgctggcgctcctctttgtcttccgctacacgctgcaagggctgggccagagcatcgtgcccaccttcgcgggcgtcatggagctgtgcatgcgcgccctggccgccatcgtgctggcccgctgcctgggcttcaccggagccagcatggcgagccccgccgcctggatcggctcctgcgtgcctctcgccatcgcctattacttcaccagcagaaagctggcgcggtccatgaagcagggcttccctccctgccgtgaggaagagccgggagccgtccggcaggccgcgtgattgcggctggcattcgccccgcaccggaaccggtatctcacccggaggaaagggaaaccgtcatggagcgccccaggggtcaatcacgggtcttcgcggaaatcccggaacgttcccttccccagtattcccgcgccttctgcaaataaaacgcgcccaggggaggcaatatttccagttccttgccccacttctccgccaattccggagaaggcatgtcctccctcatgtgctttccctccccgatcaggaacggaagcactaccaccctgtttcccttcaaacgtggaaatacttcctccacggagggggaagcgccgaaataggccagggccatatccgtttcctgcggccataaaaaggtccgcagtttctgtaaaaaggcgaacggctccggaggaaggtcctttcccactactccatgggccaccaccagcagggacgttcccggccccagctctttcccgagggcgtcgcggacggtcaggaagggcatcacgtcttccccagctccccacaccggcttgaattcgaattccggagacacgccgcgttccgcatacatggcgctcaattgttccggcagcgcttccgtcaccgtccagccgctctgcatgaagactggataaatctgaaccaccccgtcgcccggaggcaggtcgtccgcctgcatgtcccggaaggaagcctgccagacgggagcgccgtccatgcccagcagcttgatgcgatccgccagatgctgccggagttcggcccccgcctcatcataggagacgcatagcttgtaaatttttttgggcatgtgaagtgagaccccagagggaaggcggcgttcagcatcttccccacttgcagacgcagggacggtgcatgcctgccgtttgtaacagaaacgccggattccggcaataccataaccgccttttccctccatggcctcccattctccgcaatacggcaggaaaaattcttttattccgctgattttcattttcttatgaactttctaaagaaagggtccggagaaaatggtcccctcttgccgaatctcccggcggaggcaggatagcggcttgaccggagggcttgaaaccgtcatgatataaggacatacaggttttgttttatgtcgttttacattcaatccgttgaaatcggcggcccgcggccgttctacctcctgggcccctgctctctggaatgcgaatccttcgtctgggagatggcccgctccatcaagtccattgcggaaaacctggacatcccgctgattttcaaggcctcctacgacaaggcgaacagaacttccatcacgtccttccgcggacccggcgtacgggaaggctgccgcatcctgtcggaaatcggcaaagagctggaactgcccgtcgttacggacgtgcatacggcccgggaagcggagattgccgctgaatacgtggacctgctccagattcccgccttcctgtgccgccagacagatcttctggaagcctgcgccaagagcggccgtcccgtgaacatcaagaagggccagttcctggctccgtgggatactgtgaacatcggggaaaagatgcgcgccttcggctgtgacgagttcatgatgtgcgagcgcggcacctccttcggctacaataacctggtggtggacatgcgctccctgtactggatgaaacaggaaggcttccccgtcgtgtttgacgccacccacgcagtccagaggcccggaggcctgggcggaaccacgggcggagacagcgaactggctcccgtgctggcgtccgccgccatggcgaccggcagcattgacggcgtgttcatggaggtgcacaaggatccgtccaaggctctttccgacgggcccaaccaaatccccctccacctgcttgaaggcgtgctgaaacgccttcagtccatccatcaggcggttcagtcatgatgaagttaccgttcacatgctttctggtaattgccatgcatggcatggcggcgcaggcggataccaccctgcccgcagccacgcccttcgccggcgtagacaagaaattgcccatgctggagcttctgcccgtaggccaggtgctccccaaagtcagcctgtcacggtatgaagggccgcgcctttccatgctgctgaccgcttcaagcgtgaccgtagccgccccgcaggaaattgccgccagcatcctgaacgtgtacctgtacgggaagaacaaccagacctcccatcttttcacgaaggctgcctcctactttctggacaaaaaactggtcgtctcccatacggagaccaccctcaaggaagagaacttttccgccaggggcaccggcctttacatggataccaatatcaagaggggcatcatccttggccccgttcaaaccaccatccgcatggatcaacgcaacaagtaaccattccttttatgaaaaaactttcctccctgctgctgctcgccctgaccggaggtcttgcctgcggcgccactgacggcgttcccgcccatatcgtacagcctttgcccaaggaactggatccacgcctggagccgcccctggctcccccctccggcatcgtgcgtcccctgacggcggaggaaaccgcccggagggaacgggaactggcccccgttccgaccgcgggcctgaaggaagacggtgagaaggcgattgaagcgtacaacgtgaaggaaaagaccgttgacgggcagattcaggaattccgccagcagcaccaggtcaccggcaatgccgccgccccggctgcggacaccgctcccgctgcgcccaatccggaagagaacttcatgcgcgccaattcctcaaacaacctgtactccgtagattgtgacggggacctgtacttcgacatggaagaaggcgtgctggtgttcatgaaaaacgtccgggtgcgcaaccccaatctttccatggactgtgcggaccacctgaaaatttatgcggagttcgtgccgaagaagccgggcgacaagaagccctccgaacgcaagcaggaaaaagagaaggaaaaggaaaaagaaggggagaagccccaggtggccctccccaacggcggcaattttgactataactccattaaaacggtcgcagcctccggcaacgtgaaagccagctataccaacaaggagggggaaaccagcaacgcccaggcggacaagatcacctataacgccaaaaccggggaaatcatcctgacaggctccccggtgattattacgccggacgccatcatcaagaatccgaacaaggacgccttcatccgcgtgtactcgaacgggaatatgtacagcagccgcggcaccaagaccacgttccgccacgtagacaagaagctttccgaccgggacaaacagaaaaccaaccgcaagccgtgagctcccccctatccacccatctgctgagagccgaaggcatctgcaaaacctataaaacgcggaccgtcgtggaccaggtcagcctgacggtgggccatggcgagatcgtaggcctgctggggccgaacggcgcgggaaaaaccacctccttctacatggtggcggggctcgtgcgcccggacgaaggccgcgtgatttttgcgggcgagaatatcacggaactgccgatgaacctgcgcgccaggcgcggcatgggctacctgccgcaggaggagtccatcttccgcaagctttccgtggaggacaacctcctggccattctccagacccgcaaggacatgacctcccgccagcagaaggaccgcgccgtggagctgatggaccgcttcggcatcaccaagctgcgccgctccatggccatccagctttccggcggggaaaagaggcggctgaccatcgcccgcgccctcgccaccagccccaaactgctgatgctggacgaaccgttcagcggcgtggaccccatcgccgtttcagacatccagaagatcgtcatggagctgcgcgatacggacggcctttccatcctgattacggaccacaacgtgcgggaaaccctgcacatcgtggaccgcgcctacatcctgtttgaagggaaggtcatcaagcacggcacttccgaggaaatcgccaacgaccccatcgcccgcaagcagtatctgggcgaccagttccgcatgtaacgccactttccgcccctcccatgtcctctccgcagaatacgatcgccctggtgttcgactatgaccagaccctgagccccttctacatgcaggatcaggccatttttccggaattcggcatctccccgcaggagttctggaccaggtgcaacgccaccggggaacgggaaggctgggacggggaactgatttacatgaaaagcttgctggacgccctctccctggaccgcgtcagcaatgcccggctcacccagcttggggaacgcctcaccttttaccccggcctgccggatttctttgacgccttcccgtccatgaccctgtcctcccttcatacggacctgggcatcaacattgaatactacatcatttcctccggcctgaaagccctgattgacggctctgccctgcgcccctatttcaaggccgtgttcgggtgcgagttcagcgaggagaacggctacatcaactttcccaagagggtcatttcccacaccacgaagacccagtacctcttccgcatcaacaagggcatgctggattacgaccaggacgtgaacgaccacatgccggaggacatgcgcccgattcccttcgccaacatgatctacatcggcgacggccccacggacgtgccctgcttcaccgtcatgcgcaggaacggcggccacgccgtggccgtgtacaatccggaggacgaaacgggccgcagcttccgcaagtgctataacctggcctccaattccgaccgcgtgaacttcatcgccccggcggattacacgcccggcagccaccttacccgcctgctgtccggcatggtgacggacatcgccaacggcatcgtgcgccgccgtgaccgcgccctggcggattcctgcattgcggcccccaccttttccaaataaaaacctgctccattcctctccccccgtcatgaacagccattttcatttcctcggcatctgcggaaccgccatgggcgcggtagccgccgccatggcccgccgcggctttaccgtcaccggctcagacgccaacgtttacccccccatgtccaccttcctggaggaggagggcatcaccctgtttgaaggctacaaggcctccaacatccccgcggacgcggacgtcatcgtcatcggcaacgccatgagccgcggcaatgaggaggtggaagccgtgctccagcggcgcctgcgctacctctccctgccggagacgatgaaggaatacttcctgcgcggcaagcgcaactacgtggtgaccggcacccacggcaaaaccaccaccacgtccatgctggcgtggctgatggaggactccgggctgaaccccagcttcatgatcggcggcatcgcccgcaatctgggccgcggcggccgttttacggattccgatttctccgtgctggagggggacgaatacgacacggcgtttttcgacaaacgctccaaattcctgcattacctgccggaactggtggtcatcaacaacattgagttcgaccacgcggacatttacaattccctggaggaaatcaagctgagcttccgccgcctgacccagatcattccccgcaacggcctggcgctggtgaacgcggacgatcccaactgcctggacgtggtgaagggggccccctgccccgtcaagacgctgggcttttccgactcttccaacattcgcatcctggacgtggaaacctccacggacggcagccatttcacgctggaaggcacccgctactatgtgccgatgatcggggaattcaacatccgcaacgccgccatggcgattgccgccgcacaatttgcggggctgaacgtcaagcagctggcggactccatgggccgctttgaaggcgtggcccgccgccaggaagtaaagggcgtggtcaacggcatttccgtggtggacgacttcgcccaccaccccacggccatcaagcaggccatcctgggcctgcgccagcgctacccgggatcacgcatctgggccatttttgagccgcgctccaacaccacgcgcagaaacatcttccagaatgaactggcgttatccctcgctacggcggatttccccgtggtggccgccgtggaccatccggacaaggtggccctggaggaacgcctggacctcaccaaactctccaatgatctctccgcgctgggcaaggacgccctgatcggcggacaggcgcaggaaatcgtctccgccgtctgcaagaaagcccagccgggagacgttattctggtaatgagcaacggcggttttgacggcattcacgccaaattgctggaagccttgaacgcctgaccctttttcatacattcacctccaatgaaaaacgcatccaccatcaccgccttcatcatcagcttcctggtcgtgggcagcctggctctggtcttcctgttcctgggaaaccgggaggaggagcccgcccccgctgaacccgcggcgcaaacggaagttcctccgcgccagacggtgacgccccagcccaccgtggacccgctcaccaaggaagacatcagccggcagacggccacgccgtcctccctggtcaacctcagctccccccagacgctggcgcaggcgattgccaaggttattcaggaccgggacgcggacaccctgaaatccctggaaatccagcaggccgtcacggaggcccagggccgcatcatccgggaactcatggaagcgcgccatgtgcgcctttccacccccggcatcaccagcatcggcgcaaataaccagggggccaaccccacggccagatacacgctcaacttcagcagcggcgcgcgcggctacctggacatgaagcgcaatgacaagcagcagtggacactggacacccttacgctgcccagcaagcaggacctggccaaggacaaggccgcccccatggccatgaacgatcccatgggcatcgtcagctccttcatggacgccgttgccaaggcggacttccgcacggcacggaaattcgtggacggaaccaaggtgcaggacgccaccgtggccgggctgtgcatcctgtttgaagaaggcgccttccgcctccgggaggacgctcccatcaaaaccgcctatgaagcgcccaccaatgcgggctttttcgtccacctgcaggacgcccagggcaggaaagccggcaacgtgggcctgaccgtagccaagaaggatgaacaatggctgattgcggaagcctccctggacaacatgctggaagcctacacgaaacggcagggggccggagacgacattttcatccccatcgtgaagaatccgcaggggggcgattccctggccctgttcttcggtttcaatgaagattctctgtccaagcgttccgaacgccagctccagattgtggcggaggccatcaagacggatagcggcaagaagctggaaatcagcggccacacggacgatgtggggagtgaacgctacaaccagggcctctccgaacgccgggcggcggccgtgaaggcccagctcgtccagttcggcgttcctgcggaaagaatcgtcacgaagggattcggcaaatcacaaccgcgccgcacctactcccccacggcggacgaaggaacgcgtgatgaagcccgcaaggaaaaccgccgcgcggaaatgtacctggacttttaaagagtgattagagtggagagtggagagaaaagtttttcaaccaatcccattaactattctctattaactattaactgaaacgccatggcccgccgttacgtcatcaagcaggatgccgcgccagccgcgcccatctccggaatcgactaccgcacggcccttaatgaagaacagtatgcagccgtttcttcggaaccggggccggcgctcgtcattgcaggggccggttcgggaaaaacgcgcacgctgacctaccgcgtggcgtggctcctggaccacggcacggacccgtggaacatcctgctgctgaccttcaccaacaaggcggcgcgtgaaatgacggaacgggttcgctccctgattcccctggacctgtcccgcctgtggagcggcacgtttcattccattgccaaccgcatcctgcgccagcacgcggaatacctgggctatactccggctttcacgatcatggattccgacgaccgcaaatccatgattaaaagcgtggtcaagtccctcaaactggatgagaaatccacccgcttccccaaaccggaagtcctttcctccctgttcagcctggcggacaatgagggcgccaatatccaggaaacgctggaaaacgcctatccgtacctctccaaccacctggacgccatcctggacgtgcatgaacaatacgtggcccgcaagcaggaaaccaatagcatggactttgacgacctgctgctcaacgtcgtgaggcttttccaggaacaggagcatctgcgcgccctgtacggctcccgcttccagcacatcctagtggacgaataccaggacaccaactacctccagagccgcttcatcgacctgctgtcccgggaacacggccagctcatggtagtgggggacgacgcccagagcatttattcctggcggggggcggacatggagaacatcctcagcttcactacccgctacccggcggcaaagaccttcaagatagagaccaactaccgcagcgtgccggaaattctggagctctccaacgcggccatcgccgccaacgaggtgcagattgaaaaaaggctccgctccgtgcggcctaccggggaaatgcccccggccctcgttccgctcaacgacgacaggatgcaggccaaatttgtcgcccagcgcatccgggacctcattgaagaaggcacggaccccaatgaaatagccgtgctctaccgcgcacacttccacagcatggaattgcagatggaactgacccgcggggaaatccccttccgcatcaccagcggcatcaggttttttgaacaggcccatatcaaggacgtggtggcgttcatgcgctttgtggtcaatcccagggatgaactctccttccgccgcatggtgatgctgctgcccggcatcggtcccggcatggcccagaagctctggatacgctgggccgcctgcccggaaagccggctggaaacgccgccggaatccttctccgccctgatgctggattttccggtcccggccaagtccaaaacggcctggacgcagctctgctacacgctggatgaactggccccagccggaaaaatcgccgggccggcctccatgctcatttccatcaatgaagccgtgtatgacgagtacatgcaggccgcctttgagaattacgaccagcgcaggcaggacctcctgcacctggccggattctccgaacgctttgaatccacggaggatttcctctcccagctttccctgctgggcaatacggatgatgaaagcgcggcggcagacctctccggaggcgccgtcaccctgtccaccatccaccaggccaaggggctggaatggtccgtcgtcttcctgatcggcctgtgcgacggcatgttcccgcaccagcgggtgattgacgacggagacctggcgggtcttgaggaggaacgccgcctcttctacgtgggcatcacccgcgccaaagaccagctttacctgacctacccccgctggaactgccgcgcgcagggaggaaccttcatgcagatgccctcccgctttctggatgaattcccggccagcctggtggaggagtgggcggtagaataagaagcctgtcccccttcctgcggtaaatgcggggcgcactgggtctttaatccttttccgccggggagggaagacgctgcgcggaggtctggggtgacacctcctccatccatttgaggacttccaccaaattctcgtccggcggcatttcatgctttcccggaaagggaaattccttgatggcgcactgccttcttttgagaaccttgacgtcatggctgacggcactgttggctcctccgtccttgtctccattgataatagccaccgccatgcgcgtggggcacgtgaggcggtccttccctcccagccagccgcccatggatacaatccccttccacgggcggacgggcggaatcctgcgctcactatatgtaaaggcacgggacgctccgcctgaaatgccgcccatgtacatgcggtccgcatcaaaaaaggccattctctccaaactcccgttcgtggaagtccacagcttgcccagtccggcttcatgttccttggactccagatttttaaacgtcgtcaatcccagggccacccatccgttggcctcgcaggccttccggaatttctggaccatgtgctgtccattgcctacggaattaaacagaatgatgacgggaggcggagtttccgccttcagcgtggatggataatagacaaaggcttccggataggaatccgtagcggggattttagtgatcttccccagccttccttccgtatgccgctgcatgcgctcctggttgctcatggcttccggaacatgctccttgatccagtccacgtcgttcccggacaagcttgccagaggcagttccacctgtcggcctttctccaatttaagggaaactttcctgccggcggcgttgaagcggacaaaagccgccgtgatggttttgccggcggtattggtccacacgcgcggctggtgcggcacatcggcctcctgcgccggggcaagcggcagcaacacggccgcgaggaccgtaaacaatcgggtagtcattccccggtaataggctgccgaccgttggcagtcaataaaattcgcctgattgcacagctttgggcacatccctgttcggaaagctccattcttgcagaggcggaacggagcatccaaactgccaccacagccggaaacaaattttcttatttatatttgaaccattttcacggccattattccgggaaggaaacagcaaaataaaagaggacccagaaaacatcatacatccctcaccatcaatgagatattttttcttctcaggaaaatgaatttactggaagctttctggaattcctttccggctccaggtttaaaaaccctgtcatgacaaagaccgccagacaatagccgcaaccatcttatcctgaatcattttcattcccatctccatcaaaccttcccatgtcatcccactgaacagcccggaacgagaatcatctaaaacctcgggcgccgtgattgtcacgaacgcataaccacctaatcattaaacaaataaaaaagcatgaaattaagactcccacatatgctgctggcagcagttatcgcttgccttggcagtttctccgttgctacggcagctaactatgcggccaacagcgccgattcattcgtgacggcctggaaccaggctgccgcctcgaatgaagcgtcaaccatcactatcaccgtgccggcaggctccgataacatcacactgacccaggaacaacgggcccagttgaacgccatctccggaacgggcaacgttaccgtccaaatggcggaccccagcggcaaactggttaatttcaattatgatctggttaatggacaggtcagcttcaacgacatcacactgagcgaacccctgggaagcgacaatgacatcgtagtcacgaacgccacggacaccaccaccattgacggcaggaacattgccatcgaaggaacgaatgacgccgccaatcccaagacggtaggcgccaccgtcacttccacgaacggacaggtaggcatcggcgacaacgtttccatggaaaaagccgtcaccgttaccggccaggcggctcacacggtggacccctccacgcccccggcaggtgaggcctataccaggacgacctacgacacctacagcaattccaacgagcaggccgtggtcctgggcaacaacgtcaccatgcaggataccgtgacggctaccggccagatcgtcagtgatccggcggccaaagttacgctgaacggagacgtgacctccacggccgggatcggcaccgtgaccacggaacagtttgacgcggccaacaaccagaacagcaaaaccgtcatcgattccatggatgacagcatttccggcggcatcgtccttggtgaaaccacggccggatccatcaccatcaagactgtaggcggcaatgtttccctgggagacaacaccgttctgaacggcaccaccgtttccgcggaatccgtcgacctgaacaagacggtttacagcaatgacgacggcaactggaatacggttgtgggcacggaaaagctggacaccatcgaaggcagcgtcaccctgggcaacaacaccaccgtcaaggggaattccaccctgacggcggatgacaatattgccatcggcaccaacagcgtgatcaccggcaataccgccgctgacggcatcatcactgcgggaggccagatctccatcggagacggcacccaggtcgtgggcaacaccgccaccaacgccggcaaggccgccatcaacctggccgacggccagaccctgtacatcggttccggcgcagttctttccggcaacacgtccaacggcgtcctcggttccgtgcatgcgggccagaacacccagatcaacgtttatacggacggcaccgcctacaccttcatcaatgacggcattgacaccgcggctcccgcggcccccacggctgacgccgcccctctggccgctgaccagaccgtcatgacgaagaccggcacgggcaccctcgtctacggcggcggcggagccaccgacacgttcggaggcacctaccagcagcttgaaggcaacctgatcattggccacgccacctttggaaccgtggacgccgctaccggaaaagtcggccccctccagtccatcggcgccgccgtaatgggcacggacgatacggtttacgacatccggacgggccaggtgaccctggcgcagaattccaccatgaagggggcttccgcctccttcggaggcgattccaccctgctcctgagcgacggctccgtgcttgacttcggcaccccggccaccttcacggataattcccgcgtgggcatccaggtatccgacgccaccggcaatcccgtcccaatcgcccagctgaagaagggcacggaaagcgtgaacgtcacgctgaacggcacggacatttccggacgcctgctgaacaacctgttcctgaccaccaccatggctccgggaacgacggaaggcaccaccaccatcacccagaacatgaggggcattgacggtcccatgtccggctacaacggcaacgtttacaccgtagcggccgctctggaaagcaaccgcctgaacgtggccgccggttctcccgccgcccagttctatgaaaccctgctgcgcgtgacggacccgaacgaagctgccaacatgattcagtccgtcagcggtgaaaacgtgatgaacttcgcgtgggccgccagccggacgctgaggagctttgccgacctgggacgcatccagtccgccgcctccatggcccgccagacggaagacaccattgaagtggtggacgccaagggctccccgatcgcccgcaagacgatcgccaagggcaacggcaacatctgggtaggcggcatgggcaactgggatgaccaggacgcccgcggaggcatctccggctacaagtacaatgcaggcggctatgccgtgggtattgactacaaggctgcccagggttccctgatcggcattgcagtgggccagagcttcggcgacatcaaggacaagagcggattcggctccgactacgacgtggattccttcatggccatgatctacggccgcatgcatcccttcagggaaagcaagttcacgctggacggctacggcgcctacggacgctccaagttcaagggcaattcctacatcatgggaaccgccgccaacggcaatgaaaatgcggactccttcagcggcggcctgtacgccacctggacggaacacttcgcactcggcaaggccttcgtaacgccttacacgggtatcgaattcatgaccaccgaactcaagggcttctcggaaagcggaccttacggccgctcctttgaccacgcccgcgcccagaactggaccattccgttgggcgtgaccatcgcccgcgcctaccagacggacggcggcaccaccatcaccccggccttgacggtggccgcggcgcaggatgtgagccgcatgaatcccaagtccaacgtcagcggacccctgggagcctggaacgtgcgcggcgtcaacgtcggtcgcaccgcattccgcctgaatgccggcattgacgtgctcttctccagcaattggggagcacgggtctgctatcagttcgagacccgcaacaagctgacctcccatggaatcaacggagccatcagctatacgttctaagtaggacggcgcttcagcgcatgcttttacttggttatggtaggccctttcccgccctgtgcgggaaagggttttccgtatgtttcagccactgtctcctgccgcacattaaatcttttcttttaaaaacggcatctccgaataaaggaatgacgtctgcacggatttccaatccggcgtcaatgcaaatgtttgaaggaggaacacatcaggcaaacatatctttactacaacttaaacggaaaagagggcacgagcatttaattaattcataattcatttattgtaaaatattttctgattttttaatccttcaaactcgggaatgcggattggaaatccgttatccgtgtctctgttaaagtatctgttgagcatgagattatctacattctgcattttatgctgcctatccgccgggatttcccaggctgccacctatgtctggagcggagcggcaggaaacgggatctatggagattccaacaactggacggtggacggcgcgccgaacggctacttcccgcagcacagcaccaatgacaacgccatcatcggggaaaacgccggaactgttacctggtccaccgcgcaatccttcttcggcgccaccaatacggtccaggtagggtccggaagcaccctggtctgcacgactacgataggggatctcaacgtcaattcctttaccctggaaggcaattcccatctggtatttgaatccagcaacgcctttggactgggccgtgactttacgctggatttcggcacctttacggcggcggaacacggttcctggaccgctacggacctcaccaacttctggaccaacggaaaaaccgtcaccttcaccggcacgctggatatgaacagcctttccggaagcggaacgattgaactggcttccatcaaatccgcccagcagggaggcaacctcaatctggacctgagcggcctgaacatcgccagcaactcccaggtacaggcgaccgtgacgcaggtcacggaaaacggcgtcaccaaggtactgatcaactatgaaaccgttccggaacccgcaacggccacgctgagcctgctgggactgggctccctgctgttaagaagaaagagacagtagtctccgccccagcaccgattttaccccggcttgctccccaaagggaaagccggggttttcttttgccggcggggtcaattttcacaagcatttccccattcgccaacgcggccgctccggggccgcgcaacgccgccccgaacggaaaaacggaagcttccccgcgcaggtcagaactcgcagttgcgcggcgtgcgggcaaagggcagtacgtcgcgtatgttcgtcactccggtcacgaacatcagcaggcgttcaaacccggctccgaatccggcgtgcggaaccgtgccgtagcggcgcagatccgcataccagcggtaggcttcctcattcatgcccatgcggcgcatgttttcctccagaatgtccagccgttcctcacgctggcttccccctacgatttccccgatgccgggcaccagcacgtccatggcggtaacggtcctgccgtcttcgttcagacgcatgtagaaaggcttgatctccttcgggtaattgtaaacgatgaccgggcatttgaaatgctcttccgtcaggaagcgttcgtgctcgctctggaggttgatgccccaggaaacggggtaatcaaacgttttcccgctcttgagcagaatatccacggcttccgtataggaacagcgcacaaacggcgtttccttcacatgctccaggcgttcccgcagtcccttgtccacaaagcgggtcaggaattccacctcttccgcgctgttctccagggcgtcgccgaccaggaagcggacgaacgcttccgccatgtccatgtctccgtacaggtcgcagaaggccatttcaggctccaccatccagaattccgccgcatggcgcgtggtattggagttctccgcccggaaagtggggccgaaggtataaatattgctcagtgcgcatgcgaacgcctccccttcaagctgtccgctcacggtgaggtaggccgccttgccgaagaaatccagggctgcgtcacgggaggcggcgtcgcccacgtccagcgtcgtcacacggaacatttcaccggcgccctcgcagtcgctggcggtaataatgggcgtgctgacccaggaaaagtccctctcctggaaaaaccggtggatggcataggccagcctgctacgcatgcggaacacggcgccaaacaggttggtgcgggggcgcagatgggcgatggaacgcaggaattccggcgtatgcccctttttctgcaaagggtaggaatccggagcggtccccaccagctccagggaggcagcgcgcagttcccatcgctgcctgccctgtccggcaaccagagccccgcgaacgctcacggcggagcccgtggtcatttccccaatccgttcataaccgggaatgcctgcatccgccaccacctggagggaagccacggaagaaccgtcatttacttccagaaaggaaaaagccttggaatcacggcgcgtacgcacccagccctgaatcagtacgtccggcatttccgcctcactgttcaaagcatatttcaccaatgttctgctgatcatggcgcaagtataatacagcgcctttcccatgccagcagaattacttttctccggagagaatattcaggcgcttccggcagcggaaggagggcgtgcagcacggctctatttggagggctgcataacctgccgccccgtcgtaatggcgatggcgtccgccagcggcatttccttttccgtgtgggccgcaccccaggaatccgagaagatgagcgtcttcttttcctcgtcaaagccgatgatgagcctcaaatggccaccgcgcgtctgggacaggcgcagcggctcaggaacgatgcccagttgaacggaccacagcacgggaatgcccgccgtgatgtagggcctgatggcgttgagccatttgtccatctgggacggagatccggcgcgcgccagcttcagcacctccccgtccgcattgtcccagaagccggaccagtcatattcattctccaccttctccttttttaatttggaggcggcgcggttgtaggctttcagcagattccggaaatcacgggtgtccgtcagggaatccagcaccttgatccggatctggaagcgcgcccctatctttttcaggttctccgccattgccgccgtgctggttcctccttccgcggaggaattggccagggaagcaagttcgtgctggtccacgtaatccattccgtaataggcaaaaatccgggcggcggtcgccaccacgcaataacccttctgcccctggtctaccatgggaatgtcctggatgaccacccgttttccttctttcctgacgtgctgcttgatgtccgcctttctggcgcgggaagaagcgtcgcccctcgcgatggaagcctccgtggggccggccttcaaccggatgaattccgcttcaaattccctgccctcccgcgacgtattggtttccagggtaatcgcccccttgtcccaaatccaggaccagccattgaccttgaccaccgcctccttccgggtggcccggtactccctgggctgcactccggtgagagcggtcagcccttccctgacgcggtccaggcgtttttcaaactcatccttgtcaatggccccgttgtcccccttgttgtacatcatgacggtcatggactggggaacgccttccttccagtgcaccagcatttcccccagggacatttcccctattttgattgcaggcttcgcaatccggagctgggtcttgtccctgtccacccagcctccggattccccgttgaaatatttcccaaacaaatccggttgcgggagggtccagaacgcgccggattttaaatccggcgccatgtcgccagccccccatgcggcgggaagaaggcagcaggcggaaaagacagagaggaatgaagagataaatcgcataacggcaaaggagtagaggaacggtcccgctgctcggggcccatgctgacaatgtattcttccatggcggtcctgccaagaaaaaatgaatcttaccccggcggacggtccgttattagccttcccttcaccggattcattcagacaggccccaggaacaaaaaaaccggcctgccgcggtacattccgcagcaggccggcttgaatgaataaaccagtccggttacatgaacggacgcaaacgctgcatgatggcgtccttggaagaggctcccaccatcgtatccatgatttccccgtccttgataaccagaagggtgggaatggtacgcacgccataggtagcggcaaggccgttgttggcgtccacatccactttgcccaccttgatcttgccggccagttccgtggaaagctggtcaatgatcggggcgatcatgcggcaggggccgcaccatgtagcccagaagtcgacaagcacaggaatgtcggacttcaggacttcatcctcaaaatttgcttcagaaaatacgtttgccatagtaccgcttagagtatttcaacagtcattatgttcacttattcttctgcatcggcgccatcatcggaagactcttctgcaggggcatcggaggaggcgtcatcggaagaagattcggcggccgcgtcatcggtcgcttcttcaccggcggaggtgggagccgcggcagcgggcttggagtcgctccccagccagcccgtcatgctacgggcttccagggtatccgtggcgtattgataaccaacgaaaataagcgcaaaggcaagagccacgaaggaaagaatattgagcagcgtattgggagacgcttccgtatcttcttcaaacttcttggccgtaaaggaggcggaagaaaccggagcggccgcaggagcggtattcagcccgatggtggcctgcggaagctgggcggtcgccatgcctgccccgggaggggtcaggggaacggtgggcgcagcggctgcgggtgccgcaccggcgggaggagccacgggcgtcgtggcggagccgagagcaaccgtcttcaacccgccgccaagcttgatgcctccgccgagcccggcgggacgaaggggaatggtgggcgcagcagcagcgggcggcgcggcgggtgcggcgggagccgcaggagcgccggaggcgggagggacagagggagccgccggtgccttgggcacggagggagcggccggcggagtcggaatgctgggcggaggcggagtaccgcccggaatggaggggggaggtggattactcatatcggaaaaaatagctgtgctgaacgatagctctcgcttatttccgaccgtaaatcaagaaaaagaatgcgcaaagcccaaattccgtgcaattttttttaatttggagcgtattccatcctaaacacgctgtccggacttgccctgaaaagcgttctttcctacgctgtgtatccggcattatttcatatgaaacccattaccaaattagcttccaccaccttgcccgacggttccattctcgacctctgggaacgggacggcttccattttcttcttcgtgacggcgtgcagctcgcgtccagtttttcccatgggagcaatgaagcggcagcggccatggcggcagccccggttaaaagggccaaccagcccgcttttctcctggacggcctaagcctggggttcaccctgtttgccctgatggacctggtccagagggaaaaggcccgcttcatcgtagcggagccctgcaagccgctcgttgactggcaccaggagctgatggacggggaacgccccggcttcctgcacgatccccgcgtcagcgtgggattcactccggcgctccagatcgcccgcaaaaacccgaaaagcttccacgccatcctgtgccgttccacgcatgaacgcatgaacctgagcgtggcggaggcttccgactattttgccgcgctcaagcagggcggcctgctggtcatcaccgtggcccggccggacgtccggcttgcccgcacactccaaaaagcgggttttgaagtgagcacggaggccgtgcctgcctcacataaaggaaagaaaaccacttttcacaccgttattcttggaaagaaggggcgcttcgtccccttttccgcgcatcaatcctgattccatcctgccaccatgaaccgcacaactcttacaacggccggacttctggccgccctgctcatcggaattcccgccctggcggattccattgccccgggcatcctgcttcccaagaaaaacaccaagtccatttccttctcccccaaggggagctcggacattttcctgctcggcatcatgccgcagggcagctccgtcaagaagggggaatccgtggcgcaggcggacttccgcatcctggacaagagcattgaagactacgaacgcaccatcaagagcaaaaacctggaagtgctgaaactccggtacgccctggaccagcagaaggaacgctccgcgctggctctgcaaaaataccagacggccctgacccggacggaggaggaccagaaagacttcctggaaaagcggaaggcccgcatgctggcggaagaagaggaacgcgtcaacaaggccctgcgccacatgtcctacaagcaggaggagctgaaccagcttaccaagatgtacaaggatgaccaggtggcggaggaaacggaagaaatcatcctcaagcgcctgaaaaacgaactgggggaaagcgaatttgccgtccagggagccaagctagtcgcggagctggccaagctgcgcaacatccaccgcctgggggaagactacgccacggcggtcaaggaaaagcagatggatttggaacaggcccggaagcaggctgattttgacctggaacagaaaaagatagccctgacggaggcggaggtgtccctgcgccgccttcaggacaaatacaacgaactgaaagcggaccgggaaatggccgccttcaaggcccctgaaaacggcatcctgctgtacggcggctatgtggcggacaaatgggtagccattccggtggcggaaaagctcaagcccggcggcaagctggaagcctttgacaaaatcgccaccatcgtcccgccgaactcggaactgatcgtgcaggccacgctgccggactccaccgccacgcccaaggtgggggaagccgtcgtcatcaaggtaacgaacatgcagattcccggcgtcattacggaagccagccccattccgggggcggacggcaagcgccgcatcatcatcacgcccaaggttcccgccagccagatcttcgctcccggcctccccgtccaggtcaccatcaaggaccagcaggcctgatccccctacggacctccatgaataaagccgtcttttttctcgccgccctgggggccagcacggcgctctgcgcctccattccggcggaaaacgcggaaaaaagggataccattcccattgccagggtgccggacgttccgccgccctcccgggaaaccctggacgcctccatccggaaggcggcggacttcctgctgaaggaacagaacagggacggctcctggggaagccatacgcgcaccaaggggctgaacgtcatctgcccctacccggaagggcccaggtcgttcagaacggcctccacctccctgtgcgtaatcggcctgctcaccagccccctgaaggaggaccccgccgtcaaggccgcgctggacaaggccgtgcaatacctgctaaccacgctgcccaccctgaaacggggagacacgcgcaccgtgctcggcgtctggggccatgcctacggcctctccgccctgagccgggcggcccgcaatcttcctgcggattcccccctgtatgcggaactaaaaaaagtggccggccttcaggtcaaggcgctggaccagatggcggacgtccagggcggctggggctattatacgtttgaaaccttttccaaacgtcccatcggagagcccacctccttcctgacggctacggtcctgctcgcctacaaggactcggaacaggccttcggcctcaagccggatgcccgagtcgtcaaacgcgccgtcgcctgcctggaaaaactgcggacccctgccggcagctacgtctattccctttcccactctttctatcccggccggcccatcaaccgccacaccggcagtctggcccgcacccccgccggagacctggccctgatgcggtatgacccggctttcatctccaggcggcagttggaagacggcctggaacgcatctggagccgcggcggctggctttccctggccgtgaaaaagcccattccccatgaaagctttgcccagaacgcgggctacttcttctactacgggtattattacgccgcccgctgcctggaggaagtggccccggaacatctggcgcgccatgcctcccatctggcaagcgacctcctgcccatgcaggaaaaagacggctcctggtgggactatcccctgtacaactaccataaattctacggtaccggctatgccctgtacgccgtctcccgcgtcagggaatccctgtacccttccaatgccgcaacggcctcctgacccatgttccgcctgctgacgaccagccttctcgcgattctgtgcctgcatcttcccgcagcgcacgggaaacccgcgcaggcggaaaaggcggatgccatccagatcgccaaaattccggacatcccgcccgcgaaatccgaacaatttgaccaggcgttccgccgcggcgtagacttcctgctgaaaacgcagaacagggacggctcctggggcgaccaccgggtgatcggcacctggaacatcctctgcccctatccggacggcccgctcaccttcaagacggcaagcaccgccctgtgcattgcggggcttaacgccagccccctgcacaacgaacccgccgtgcagcaggccatgacccgcgcggaaaactacctgatccgtacgatgccccatttgaagcgcggcgactccctttgcgtgtacaacacctgggcgcatacctacgtgctggacgccatgagcatgcgggccgcaagactggaccggaacagcccgcgctaccgggagctgaaaagctgcgccggctcccaggtgaaaaagctcaatgagctggcttccgccatggggggctggggctacctcacctattccggcttcagcaaacggcccgcggcgcagcctacctccttcctgacgggaaccgtcctcatctccgcctggatggccggaaaatcattcggcctgtcgctggacaacaaaatattcagccgcgcgttgaaattcctcaaatcccagaggacgccggcgggaacctacgtctattctctggggcatgccttctatcccggccggcccatcaaccgccacaccggcagcctggcacgcacccccgcctgtgactacgccatcaggctctgggagccggaggacatctccctgcgccagctcgtggacggactggaccgcctgtggagccgccggggatggctgacgatggccctgcacaagcccactccccatgaaagtttcgctcagaattccggctactttttctactacggatactattattcaggaatgtgtctggacatgctggccccaaatcaggtaaaacgccatgcgtctctattggcggacgacatcctcacccgtcagggaacagacggttcctggtgggattaccccctgtacaattatcacaaattctacggcaccggctacgccctttacgccctttcccgcgcgtgggacaagctgtacggacagccggaaccgccttcatcccttacttccacaccattccggccatgacaaacaccatgaaatcccttctggcgctctgcctgttctgcggcgcgggcgccgtctccaccgcggaaacgccggtccggcacacgtccttcaagcccggtgaaatctggacggacaacaacggcgtgcacatcaacgcccacggcggcggcatcctgtacgacaagggcacctactactggtacggagaacacaaggtggagggggacgccggaaaccgcgcccaggtgggcgtgcactgctattcctccagggacctgtacaactggaaggacgagggaatcgccctgaaagtggtggaaggggacaactcccaccccatcgccaaaggctgcatcctggaacgccccaaggtggtctacaacaagaagaccaaaaagtacgtgatgtggttccatctggagctcaagggaaaaggctatggcgcggcctatgcgggcgtggctacggccacaaagcccaccggcccgttcacgttcctgaaagccgggcgcgtcaatccgggcaaatggcccatgaacatggacaagaaggaccagaccatgaaaacgttcaagggagtgcccggcctgacctccagcgccctgccggaaggcgtgcgttccgaggacatgttcaagaaggactttgaaaaaggacagatgagccgggacatgaccatctttgtggatgatgacggcaaggcctaccacatctattcctccgaggaaaacagcactacccacatcgcggaactgacgccggactacacggagcacaccggaaaattcgtccgcgtcttccccggccgcttcatggaagctcccgccatcttcaagcacaagggcaaatactacttcatcgcctccggatgcacaggctgggcgccgaacgccgcccgcagcgccgtggctccccgcattgccggaccgtggacggagctcaaaaacccctgcgtgggtcccaaggccgggagcaccttcggcggacagagcacctacatcctgcccgtacagggcaaacccggcaaattcatcttcatggcggacatctggcggccccagaacgccattgacggccgctatatgtggcttcccatccagtttgacggagaccagatcaaactggaatggaaagacgaatggaaactggaagacatgtaacccgattcaccgccaacacgcatgaaaacactgctgctcaccttttttgccggactggcctgctgcctctcctccgttgccacggctgacgcccccgtcaaacacacgtccttcaagcccggtgaaatctggacggacaacaacggcgtgcacatcaatgcccacggcggcggcatcctgtacgacaagggcacctactactggtacggggagcacaaggtggagggggacgccggaaaccgcgcccaggtgggcgtgcactgctattcctccagggacctttacaactggaaggacgaaggaatcgccctgaaagtggtggaaggggacaactcccaccccatcgccaagggctgcatcctggaacgccccaaggtagtctacaacaagaagaccaaaaagtacgtgatgtggttccacctggaactcagggggaagggctacggttccgcgtacgcgggcgtggctacggccacaaagcccaccggaccgttcacgttcctgaaagccgggcgcgtcaatccgggcaaatggcccctgaatctggacaaaaaggaccagacgaccgagttcaccaaggagatgcctgactatgtccgcatcatccgcagggacttccccggcggccagatgagccgtgacatgaccatctttgtggacgacaacggcaaggcctaccatatttactcctccgaagggaacatcaccctgcacatcgcggaactgacgccggactacaccgggcataacggaaaatacgtccgcgtcttcgtcaaccgctacatggaagctcccgccatctgcaagcacaacgggaaatactacatgatcgcctccggctgctccggctgggcacccaacgcggctcgcagcgccgtggccccccgcatggccggaccgtggacggagctcaaaaatccctgcgtggggcccaaggccaatatcaccttcggcggacaaagcacctacatcctgcccgtacagggcaagcccggcaaattcatcttcatggcggacatctggcggcctaaaaacgccattgacggccgccacatgtggcttcccatgaaatgggacggcgaccagatcattctggaatggaaggatgaatggaccctgaaggatctgtaaccgtttccttcccccctttcatgcaggatacgatctactgcttccacctcctggccacgaggcagaagcgcaccctgctatatgccctgtgctccattcccgtcgtcacggcaatctggctgctgaatccggaatggcctttctgggccggttacattgcctgggcgctcgtctgcacggcagttctgatgattcaatatgccgcccctctccccatccgctgcccacactgcgggcatgccgggcttcgccccgcctcgcagacgccggaggaacagggaaggccggacacaggcatcatgctggaatgccggggctgcggctcctccttttatacggacgcctatctcccatggccggggaaaagcgttcgccgccgtcccgtttccgcggatgaatgggaagaaaaacctgcctgtaaacaagccgggcctgcttcctccggagaggaaagcaggccggacaggttttcgtgaatttaacggaggaaaagattaacgggctttcttggaagccatcacataattcctcatgcgctggtcagcgggagtggtggggcgcacgctggtgacccagttgccatccttgtccttcttcttgatttccgttctgtcccggtacagcttcgcggagaaatcgttggaatcaaggatcaccgggccggggcccttggtgacgatgggagtgggcggtacttccgccaccaccgtcatgggggtagtaagggaatcataccagtacaccagttcctgctggccgatggggttgtccggataaggcgcataggctccgttattggtggaaaccttcacataggccggttccgggaacgtggtctgataggaagaaggggaacaggcccccaacagcaaaaggccggctccgccgacaatgatcatggaatgcagtttcatataggcatttgattccctcccgtctcgttccgttcagacgatgcacggttccgggaacttccactatgccgtgaaaactttccaaattcacttattttcaaacagaaacgtttatgaatgacagaacttccgcccgtttgtcttatctccgtcttgaacgcgttgctgcacgccggaaaccatcgggacctcttccagcccttgcaccctccggaatattccggacaaccatgctccgggcaggtaaggcggcattaacaaaaaccattccccttccaacaaaaaaacctgccgggaatgacctcccgcaccagctctgaaaaacgttcccggctccggctcagtcatacgcaggcggagaggaaggggaggaatgttctctctcctttttccgttcttctccggtgatgcctccgtgacgccgcagcaacgcggccatctccccatccccgcgctccagcgccatgtccaacgccgtacggcccctggcatccaccgcattgagcagctcccggcacgaaaccagaatatccgccaggggagcggatcgggaggcaacggccttcatcaggggagtcgtcgtaccgcccggaagcatatcctccccggacaggcgaagccgggacatcagaaaacgaagcatgctctcatcccccgtttccacggccaaaaaaacggctggccagggagaaaccgaactgaataaatccgtgcgcagcctttccaggttttcagacaattttcggtaagccgcagcggacgatcctccggccgctgccatgcgctccacgatcagacgcgcttccccaaagccggcaaaattccgggccgggctggtgaagccctctgatcttctctccggtaccagccccgcgacggccagcaaatcccggcacctctggcggtacagccacgactcatgcgccgtcatgtaaatgcctatcccggaactccagaaataaatgccgggctgaatttcatactccacggaaaaaaccacatcacgccgccacgcccggtccgcctcccggagcctgtcctcccatccggtacgcatgaaactgcagccattctacggcaagaaagccgtccggataccggacaaccgggccttccagtaattccggtaggagcccagcaggaacttgacgaagggatattcagaagaacaaacggcctgttccaccttttgcagcacggggtcattctcctgccagccgggatcaacgggcgcaatgtccaccagagggtaggcattcgtcgcgcaggccgtatccgcaatagccatcatccgttccatcttcttgaaggcccggcgcacatggacttccgcctcctccagctctcccaatgacccggcatcgggtacgccctcccccttcatggcagagcgccggttttggtcggccagcatccacgccctgtaaaacctctcatccgctcttaaaaatgcctcccaagccacctgcgcctgcacccaggattccatcactatttcatcctgcaattcctgaagaggcatttccttaaaccactttgattgatgttcaatcaattccgactttacaaaccaccgtgaagccaaccaggcggctacgggagcataaagagcatccagccgggactgccaataggcgtccagtgcggcggcggcttccttcagcgcacgagcatccttcgccgcccgggtggcgtctatcgcttgttccagacggacaggctccgtcccctccggaccaggaaccgcaccttttccataggctggtatatattcggcgaacgccttcaacgttccggaaggcagtaaaaactccctggaaggatcggacggcacatccccggaagcccacccggccacgcaaaatgccgccgcggccataatccgccatctcatgcccatgctgctcctgttctcttccttccggcttccccgcacgagccgccatcatgtcatcatccggatttcacggccttttcttttcaacgggcaaccgcatgaaggaaaggagcttgccgggaacgcggaggcgtggttgaatgcatgccttctccatgattacggatttccggctgaaagtgtttgagaccgtcgcgcggcgcctgaacttcacgcgcgcggcggaggagctgttcatcacgcagccggccgtcacccggcatatcaaggagctggaacgcctgctggacgcccgcctgttcaaaagggaaggccgcggcatcgccctgacggcggaaggcgtgcgcctgctggtccattcccgccgcatcctcaaggaatatgaaacgctggcggaagacatgtcttccggccggaatacgcccgtttccggtgaattgagcctgggagccagctccaccatgtcccagtacgtcctgcctccgctgctggccctgttcaaccgccattatccggaaatacgcatacggctgaaaagcggcaatacggaggaaatcgaacaggccgtgcaggatgaagccgtgcagctcggcatcgtggaaggcaccgcaaggcgtacggacctgcattacctgcccttcatggaggatgaaatcattctggcgggcggttctcatgccgccgccccgcgggaaggcctctccctcccgcagctctcccatgttcccctgatcatgcgggaaccggggtccggcacgcgccgggtggtagaggaagtcctgaagaaacacggaatcgccgcttccggcctccacgtcctgatgacgctgggcaatacggaaagcatcaagatgtatctggcgcattctccggcatgctcttttctctcctccctcgccgtgcgggaagagctcaaacgcggggatttgaaaaaaatccatctccgccatctggaaatccgccgttccttccactttgccaacgggcacggagactacagcagaatcaatgaattattcatcaaattctgccggaattattataacaaaatctaatcgcctataacaatttctgattagattttatgatgattgtggagtatatctcccacgcagccgttccggcacgttccccctccggacaagacgggcggccgcagccatcattctacagcccatgtcccccaaacatctcgccaatccgctccacggcatcctgctcatcgtcctgttctccttttccgccttctacattgcggactttgaatgggtgaaacacctctccttcagtccgctgatcgtcggcatcgtgctggggatgctttacgccaacagcctgcgcaaccaccttccggaagcgtgggtgcccggcatccagttctgcaccaagcaggtgctgagaacaggcatcgtcctgtacgggttcaagctgactttccagagcgtgatcgacatcgggggcgcggctcttctgatcgacctcattgtggtctccctcaccattctgctgggcgcgggactggggcggctgctgaaaatggaccgggacacggcccttctgacctccatcggcagttccatctgcggggcggcggccgtcctgggcgcggaacccgtcgtgaaaagcaagccttacaaggcggccgtggccgtttccaccgtcgtcatcttcggcacgctatccatgttcctgtatccggccctgtaccgggccggaatgctgaacctgacgacggaacagatgggcctctttaccggagccacccttcatgaagtggcccacgtggtgggcgccggcaacgccatggggcaggccatctccgacccggccatcatcgtcaagatgatccgcgtgatgatgctggccccggtgctggtcatcctgagcatcatcctggcgcggcgggactccgccgccggaggaaacagcgaaaaacgtaaaatcaccatcccctggttcgcgttcctgttcctcgccgtcatcggcttcaattccctgcacctgctgcctgccgaactggtggacgccatcaacaccctggacacgttcctgctgaccatggcgatgacggctctgggcgcagaatccagctttgagaagttcaagaaagccggagcgcgccccttcctgcttgcgggcctcctgtacgtctggctcttcttcggcggctactggctggtcaagctcatcagcttctaaactttaaagacctttcgcctgcggggggagcatgcatccgcgtctcctccccgtacggaagcaaaaaggccgtttcatccgcaacggaacggtttccaacagagaaacggctactcaacatgagttccttgagataaaaagcagcccctgattccggatttatcattcgtttcccggcggatccgggcagtaaaccgctcctattcccgctgctgcggcaggttttcccagcctgccccaacaaaaattcatagccaaaccgtttggagacgctatagtacacgtacccagtttttaaaacaaatggcaaccaaattattcattcccggacccactgaagtagcacctgaagtacttgccgccatgagcggcccgatgatggggcaccgatccaaggcggcttccgccctgcagcgccgcatttccaacaatctgcgccgcattctgctgacggaacaggaaatcctgctctccacttcctccggtacgggcttgatggaaggcgccgtgcgttcctgcaccgccaagcgagccgccattttttccgtgggcgccttcggcgacaaatggtacaagattgccacgggcaacggcgttccctccgacattttcaagagcgaactcggccagcccaccaccccggaaatggtggacgccgccctctccaccggcaagtacgacactatctgcatcacccataatgaaacgtccaccggcgtccagaacccggtggaggaaattgcggaagtactcaaaaaatacccggacgtcgtatggtgcatggacgcggtaagttccgccgccggctcccggattgaaacggacaggctgggcgtggacgtgctggtgacctccacccagaaggcgctggcgctcccccccggcatggctgtctgcacgctgtcccaaaaggcttatgaacgcaccgcctccgtccccaaccgcggttgctactttgacctgcgctccatttacgacactatccagaaaaaggactaccagtacacgaacaccccctgcgtctccatcatgtacgccatggacctccagctccagcgcatcatgcaggaaggcgtggaaaaccgctttgcgcgccatgaagccatggcggaattcgtgcgctcctgggcggatgaatatttcagcgtcttcgccaaccgggaccatctttcccgcaccctgacggtcatcagcaacacgagggacattgacatcgccgccctgaacaacgtgctgatcgaacgcggcatgcagctcggcaacggttacggggatttgaagaacaagaccttccgcatcgcccacatgggtgagctgacgatggacgacatgcgctccatcacgtccaacatcgtggacatcctgaaactcaagtaagcgttttcccttccctcttttccggccccgcccgggaaagagggaagaacgcctcctccggagaatgaacggaacagccgccatgaacaaggttcttcacacggcgctccaggctctgttcatcatcgcctccgcctgcgtcctgacggccctcatcatcgccggagccttgaatgaagccatgcgcccctggtccggagccttctttctaatgcttgttccgtactacctgatcctggtgaaaaaacgcctggaccgggaacaggcgggggaaatggcgcgctcctgcacatggagcatggccgccgcggcaagcctgttcctgctgctcatcgggatgctcctgctgttgaacagcattccgggaggcggagagtttgtccggcttctcctgttcaagcccctggattttctcaaagcggcaggagcgcccatgcggtacctgctgctgttcattgcggcatgtattttggcggggcttgtctccggcatccgtgcgctatatcattgctccctccgtcattaaccttctgtactctctcatttttccatgtccacactccatcccttccccgccctccgtccgccccgggaactggccgcgcgggtttcctccctcccctatgacgtcatgaaccaccgggaggccagggaaatggccgccggaaacgacgcctccttcctccacatctgccgctccgacatcgacacgagcgaaaccgccatccacgccccggaaacctatgccaaggcgcgggaaaacctggaagcattcgtccgcaagggctacctcgtccgggatgaaaaaccttccttctacatttaccgccagatcatgtggggccgcgtgcagacgggcatcgtcggctgcgcctccgtggatgaatacgccagcgacgtcatcaaaaagcatgaactgacccgcagggaaaaggagctggaccgcattgagcactttgacgcctgttccgcccagacggaaccggtattcctggcctaccgcaagcacgagggcctttccggcatcatccgggaatggatcaaattccacaaaccggagtacgatttcaccacggacgacggcgttacccacatcctgtggcccgtctccgatcccggcacggtggaagccatccgcaaaggctttgaagaagtggatgctctttacatagcggacggccatcaccgtacggcgtccagcgccgccgtttccgccaggcggcgcaaggagcacccggactacacgggacaggaggaattcaattacctgatggccgtcgtcttctgtgatgaagacctcttcatcatggactacaaccgcgtcgtgcgcgacctgaacggcctgtccagggaagaattcctagaaaagctccgcgcctcctttgacgtggcgcctgcggacgccgttcccggagaaggctacgccccccgcgccaagcacgaattcggcatgtatctggacggccggtggtattccctcaccgccaaaccgggaaccttcccggcggaccatcccatcgaaagcctggactgcgccattctccaggcgaatgtgctggcccccatcctgggcattgacgatccgcgcacaagcgaccgcatcgacttcgtaggcggcatccgcggcctgggagaactggaacgccgctgctccggagaaatggcgctggccttctccctgtaccccgtcaccatggacgacctcttccgcgtggcggatgccggggaaatcatgccccccaagtccacgtggtttgagcccaagctgcgcagcggactttttgtccataccattgaacaatgacattttccaccataccaacatgaacaaggttcttattcccaccaaactctccgacgtagcggccaatacgcttaaaacggccggctatgaagtcgtccaggacgccgacacgcctctggaagaacaggccgccgcccatccggacaccgtggccctgatcgtccgcagtgaaaaagtcactccggcaatcatggacgccctcccctccctgaagctggtcatccgcgccggagccggctacgacaacattgacatcgtgtacgcccgcaagaagaatgtggacgtcatgaacacccccggcgccaactccaacgccgtggcggaggaagtcatggccatgattctggcgtattaccgccacatcgtccaggcggacgccaccacccgggaaggcctgtgggaaaagaaaaaatacatgggcagcgagctgaccaaaaaaaccgtgggcatcatcggcctgggcaacatcggccgcaacctcgtcaagcgcctccagggatttgaacccaccctgctgggctacgaccactttctggcccgccagcgcgccctgaacatcggcgtcacccccaccagcattgaagacatcttctcccagtgcgacatcatcaccctgcacgttccgggcggtccctccacccaccacatggtgaacgcggaacttatcgacagcatgaaggacggcgcggtgctcatcaattgctcccgctacggcgtggtggatgaagaagcgctggccgccgccaaggccgcgggcaaaaacatcggctacctgacggacgtccaccccaaggacgcgccaggagaaaaaccttccgccgccatggcggacctcatccttccccacctgggcgccaacacccgggaggccaacacgaaggcggccaagcgcgccgcggaacagatggtggcctatttttctgacggagacacctcctgcgtggtgaacggggaatcccccaacggtctcaatccggcccatctccaactggctttcctgctcgctgccctggcccgcaaagccggaggcaacaagcctatccgccgggtggaatgcaccttctacggcaacttgcgcgtcttccgcaaatggttcactgcccccattctggaagggctgctgccgcacgcggaaaagggcctcatgcccgccgccgcggaagaatccctgcgggagcacggcatcgtcttcaaggcgcgggagcccaaggacgacaagccctatgaagattccatcacgctggacgtggtgatggaagatgagggggaatatttcaacaccagcgtgcgcggcgtggtgacggaaggcattcccatggtctcccgcctgaacaacttcaacgggctgtatgcggacctgcgcggcacaacgctgttcctgcattacaaggaccgtcccggcatcatcgccaccatcggttccgccctgtactccaacggcatcaacattgacaacatcgccgctccggccgatcacgccacgcgggaagccctggccgtcctcaagaccaacaaacccgtttccgatgaactgctgaacaagattgcggaagagatagacgccatctccgccttctccctgaatctttaacaggaattagactcatttccggactctgccggaacccgccttccaggcagcccgcttcctctccattcccggagggaggcgggttgcctttatttctgccatgttgacaaggcacactcctttttgtacttttacccgaatcgttggaacactctcatgcgctatgtactgcttctcctgaccattttaaccgccggattctccgtctggtactatcaacaccatatctccccggaaggaaaggaactggccgcccggaaaacagccatggaacaggaggccgtagtattggagaaaaccgtcagccagacccggaagaaactggatgaagcccaggacgccacccggacggcggaagaggccatggaaaaattccaggaaacctatcttgagcagaaaagacagcagcagcaggaagcccaggttgccgcctaccaaaaaagcatggcggaccagcaggaggaagtgaaggaacacgaccagaggattgaccagttgcgccgccgcatgagcaggcagagggaaaactccaagtccgccagggaagaactgcttcaaaagagggagggaatgaaaaccctgcttgcgaagttggccgacaagcagagaagtattcaggcggaactggggcaggccgaacgggaactggccaagaaccgggaggatgccaaagccaaaaagaaattttcaggagccgctccccagaaggagaacatctcggaacttcaatcgcaaatagccttcattcgcctgaaaacctccgccacaaagaaaaaaatgcaggctctggacgccgccctggaagccctggaagaaaaaaccggcaagcagcagctactgatgcagaaagcggaggaaaaactcaccgaacaaaaaaacaaggccttaaccgacgatgaccgggaagaaaccgccgccccggacccgggagatgacgatttgctggctacagccggatacagggagcagtccaaagccgtccggaacgctctggaacaagcccggaaagaagaggaacaggcgtcccggacctatgacgaggcccgagctgaaatgcgcaagtcttccagagaagaagtgaaaaagctggagaaggaggaaaaagaccatgcctccttccagaagctgttcacgggcgctgcctccgttgtgggattcatcctcctcctgttcacggtgggggccttccgccgcagcaacggctgagcgtgttcctgaaaacttgagggcacggaatgaagaaaagctcctgcgtcccgtttgccgctcttccggcgccctccgcagggaggcgttgacgggcggcagggatatggtagtctcaggcctgcctgatcatgctcacactggcccagcttcacggacaaccggaaattttccattccatccagggggaaggcgtctcccaggggactccctgcgtctttctgcgcctggcaggctgcaacctggcctgttcctggtgtgacacggcgtactcctggaacgggacagttcccggagtgcggctcacgcctgaaaaggcggcggaactggcgctccgttatccatgccgccgcctggtactgaccgggggagaaccgctcattcagcaaaaagcccttcccgccctgctgcgcctgctgccggaccatgccgtggagctggaaaccaacggcaccattatgccggatgcggaactgctggaacgcatcacgcaattcaacgtgtctcccaaactcccccactccggcaatgaaaccgccagaacatggaaaccggacatcctgcgccgtctggctttcacggaaaaagcgtggttcaaattcgtagtggcgtgcgaggaagatgtaaaaaccgccctgcggcaggcttccggggcagacattcccgcagaacgcatcctgctcatgccactggcctccacacgggcagagctggacgccatgcgcgcgcagacggtggaatggtgcctccgttatggcctccgcttttcagaccgtctgcacatcgccatttgggacagcaaaaagggcgtttgaaaacgcccttgtatagtcaaaggaaaatattccctggcaggcatcctgcgtggagctcttcgccccatcattccggcagcttatgccttctgcttcaggtccagcagcatctgggcgttgcttgggtacttgttcaggaaaaacaggaagcgttccatggcctctacaggcttgtgccccgccagcgcgcggcggatcaggttcatcttgtacagccacgcttccggcatgatgagttcttcccggcgcgttcccgatttcaggatatccacggccgggaagatatactgctccgcaatgcggcggttcaggacaagctccatgttgcccgtacccttgaactcctggaaaatcaggtcatccatacggctgttggtttccacgagtgcagtggcgatgatggtcagggaaccggcctggcgcgtattgcgggcggcggcaaaaagacggcggggcatttccagtgcacgggcatcaatgccgccggacatggtgcggccgcttcccttgtccgcgttattataggcacgggcaaggcgcgtgatggaatccatcagcaggaagacatgctggccggcttccacaagccgcttggcgcgctcaatgcaaagctccgccatgcggcagtggtcacgcaccctgccgtcattggaagaagcgtatacctcggctccgggaagggaacgcttgaactccgtcacttcttccgggcgctcgtccaccagcagcaccatcaggtggatggaatccttgtaattctccagaatggcttccgccatgtgctgcagcagcgtcgtcttccccgcgcggggcggagaaacgatcaggccacgctggccgcgcccgataggcgcaatcaggtccagcgtgcgcgtggtatagcgctccggacgggtttcaaaggaaatgcgcttattcggattgaccgccttgagctcttcaaaatgcgggctcttgcgggccttctccggagcatctccgttgacggcggatatctccgtcagaagaatgccgcggtcatggcggcaggcttgtccatgcacccaaacggcgggacgcaggccgaacttgcggatcatgtcctgcggaacgtacacggcttccgcaaaagcgtcaaaatcattatccggcttccttaaaaagccgaatcccttattcgtgatttccagcaggccgtccaccggttccggaggcgccagctcacggggagcattattctggggagcattcccctcctggtgattattgttccagcggtttttaacccggtcattgccgttcctgccattgcggccgtcctgccggttgttccggttcttattgaaacggtcgttgttattgcggcggttctgtctctcaaaacgctgcctttgcggttcattcgtccgatgggattcccgcgcggcatctccggagaaatccgtagcgccttcctgtaccaccttgatggacggagcggcagaatccgcatccggccctgtctcctgtacccgcggttttctcacaaacctctggcggatcaccttcggcctgcctccttcggactgttccggagcagaatccgcaggactggcggccggttcggcaggcgccatggaaacggcagcgtccgttttggcgccctctgcggcatcgtcttcaggcgcaatggtcttggcggaacgcctgcgcaccggcttgacgggagcttccgttacgggaacatcaggggaaccggcagtttccggaacttcctccacgggcttcttgcggggacgtccgcgccggggcttggcaggagcttcctccgtcccttccgccgccggaatttcagcgctgcttttgcgggcgctcttcttctgcggcgcatccgtgctctccatcccttcacccgccaattccggaaccttcttccttgccgtccgcttgcggggggccggggaagaaccctgttccgtcccggaaacttccgcagcggcgtgggactctgccggagcttccgccgcagacttggctctgcggacaatacgttttttgggcgatggctccggagaaacctgttccggagtcaaatctgggggggtatcagacatggaaaagaaaattggactgcaacaacaggcgtctcctgaaagacaacggcgttagtcaagctgttcgaggatttcttccgccacgtcgaaattggagaagacgttcagcgcgtcatcgtaatcgtccagcgcttcatacaagcgcagggcggccttcgccgtctccagatcgttaatcacggaaacgttctgcgccacggaaatcagcttcatggaaatcaccgtatgcccggcctcgcgcagggcggcgcacacattgttcaattccgtcgggtccgtaacaaacacccattcattgtcggaatcaccctgctccacatcgtccgcgccgcattccagcgccaggtccatcgcggaatcctccgtaaggccttccgccatgatgcgggcttctcccttgcgttcaaactggtaggccacggaaccgggagtgccgatgctgcccccgttcttggtaaacagagtgcgcagctcggaagcggaacggttcgtgttgtccgtcgccacttcaatcaggaaagccgtgcccgccgggccgtagccttcataagtaatctcctggatggtggcgccgcccagttccccggtgcctttcttgatggcgcgttcaatattctccttgggggtggacacggccttggccccgtcaatggcggccctcaggcgagggttcagatcaggatctccgccgccgctcttggcggccagcatgatttcatgggcaaagcgggcaaacaccttgcccttcttggcatcttccttagccttaacgtacttgatcttagaccatttattatgtcctgacatagaattgggaataatagtaagtgtatgtgaaaagagacaaactaacaagtggaactgttcttcaacccgggcgaacacattgtctttcgcaaataccacgcaggaagggaatcagggtgcggccatccgtaaataggttacagggaccggatactctgccggggaacacgccgcactcccttaaggggctccggctaccgcttggcagtcactctcaacacacgcaaaataacgtattccccagcattggcaatacttttttaggtcacggaagcatggaagcaaaccccagggaaccggataaacaattcctcccacagtctggagtaatcattctacggaaagactgcccgtcttatttaatttgatgaaagcgcgagcatctccaggaaaagatggacggccgctttatcctctctccgctagtccgcctcacgctctattatttccccttcatcccggttgtcgggctcatagcaggtaacatcttcgtttaacatggaatagtaactatatggctcttccttttccaaaggcccttcccttgctttttgaaaatgcttcaattccctgccatgctcatcaaaatagctgatttgctggaatccatgttccggataggaaaaacggataatagcacacttcattaaatgatcggaacttaactctccgttttcgtcgtaatagcggatttccttcacggcgcggcctcctcccaaatcactcccaggttcataatggtctgcacaacgccgggcccacccctggaggccacgagtcaaccggccaaacttgtccgtatattccgcttcagctacatcataagggtccagataatactttgcttgaagcaaatcttcaggaagaagtaaccgcaattgatcgatatcgttccaatcaccaaatctttcttttaaataaaaggtttttcttgtggaagccgtcaattccgcttcccatccttgatgaacttccaggcaggcaacgcccgcctccacggcaggcgttgccttgtactgatggtaacggatcattcgtcctttcggaaaaatagccggacgttccacatccacaggctcctggcttacgacatttcttgaatcatctccttttccaaaaaaggattccctgaaaatgaaaggaccattgagaatccctgccccttcctggcaaataacctctccccggtgataaccatttgcacaaagggcatcttctccccgtacaccataaaaagtgacgcacctgcgtcccctattctcttccaccacacgcatgtgatagccctgatcgtcaaggtcacagattttcccatccgcggtgaaataggtgtaaatgcacaacgcatattcctgaatgtccgtccattcccggtcgttcgtttcatcataatcctttttggggtagaatccggacaggagattcaaaacccctccctgcttccggtttgttccgcggggcgcgtcgatccattcttcacaattaagaatcagtttccattgcagatattgatgatcattgaattcgatcaacttttgttcaatccatcttccattgacgggaggatacttccggtcggaatagccggggttgaggggctcccataaatccatcacaggatgcccaaccgggtcaatcattcgcctcgccccttccgaaaaagttatcccgcctgaaactgctattaaaaaaatgtataaagaacacctcataacatgatccatatcattaccctgaatgatgtatcctaatatgatgtgaaggatatatcaattatttcaataaaccgaaccctctttatttgatcttttagaaccattttcggaaaatgtcacgaccatccggacgtggagcataaccacttttgccggccccttctccgccttttcctgacacagtccatcagagggaggacaggatggcatttccacttgttgaaagaacccccgtaatcatttttacacgggaaaaaaggatttccgccacacgcccggcatgttccggcttgattagaaatccattcaaaaaatattcaagataataataaacattaaaagtatccgcgatattctgtcccgcattttcccgggaaaacctctattccgtcatggaacgggaccgaagttcaacgccgtctgtgttatcattgactaagaaagggaggcgggcttagatatgctcctcttccttttctctgtcttatggaacaagcagcgcaccaagaaaaatcacatgcggccttttcctccgtcctgtggtccgcctttttgacgggcatcaagctctgggccggtatcgtgacgggcagcttgggcatcatttccgaggccctgcacagcggcctggacctgatggctgcggccatgactttttacgccgtgaaggtggccgcccgtcctgccgacgagagccacccctacgggcatgagaaggtggagaatctttccgcgcttgcggaaactgccctgctcctgattacctgcgcatggattgtatgggaggctgtggaccggctgttttacaatgaggcggagatcaccctcacctggtgggccttcgccgtggtggccgtttccctgctggtggacgtgaaccgctccgccatgctccgccgggtggccaagaagcacaagagccaggcgctggaagcggacgcccttcattttaccacggatatctggtcttccgccgtcgtgctgctgggccttttctgcgtatggctggcgcacctggttcccgcagattccgtctggcacggcttgctggagaaggcggacgccatcgcagccctgtttgtggcggccctggtttgttccgtggccttcggccttgccaaacgttccattcacgccctgatggacggcggttcttccgccctgacgcagcaggttctaaccgccatgaagaagaacgccccggattacccggtcaagcgcatccgtctgcgcgacggcggcgcccgcatttttgtggagctggacgtggaagcgcccgcggagttgcacgtggacgacgcccatgatgtggcggagtccatcgaaggcattgtcaagtacgagctgccggaagcggacgtgatcgtccatatcgaaccggcccgtgagaatttttccaacatggagccggacacggtcgtccaccggctggccctgcgccaccatgtccgcatccacgggttctatgcaggcagcggcaaacatgctccctgttatttcatggatgtggagattcccgcggactggcctctggagcgcggctaccatgtggtgaaggcgttccgggattccgtccagcatgcgctcaagccggagaaggtgatctgccgcattgagccggactgccgcgatatgaaggcgaacgccattccggagcacgttccgccggaggaagtccgcctgaaggtgaaccttatcctccagcagcacaggaatatctgcaaggttctcaagctggacctggcacgggaggacaatttccccaccctgacttgcgtatgctccgcggatgcatccctgaccatccgggaatgccaccagatcgcctcccaactggaagaccagatagaaaatgccctgcaccacctgggccgcgttaccgtcattctgaaaccggccaaataaaacagcattttatttccacgcaacgttcatttcctccccatcatgaaacaaaacaagtacgacgataacgtcttttttcagaaatacagtcaaatggaccgttccgtaaaggggctggaaggggccggagaatggaaaacactggaacggctgctgccggatttccatgacaagcacgttctggacctgggatgcggattcggctggcactgccggtatgcggcagagcacggggcggcctccgtgctgggcgtggacatttccgcaaagatgatcgccaaagccaggtccatgggaaacgaaggcattatcgagtaccgctgcatgcccatggaggatatcctgcttcccgaggcttccttcgacattgtcctcagctccctggccttccattacacgccggatttccaggcagtctgccggaatgtctcccgctggctcaagccggaaggcgcctttattttctccgtggagcatcccgttttcaccgcccagggaacgcaggactggcattacgatgaatccggccagatcatgcactggcccgtggacggctatttcatggaaggaccgcggcaggccgttttcctgggggaggaagtgaccaagtatcacaggacgcttacttcctatctcggcgctctggccgccggcggatttgaggttaccgccatggaggaaccgaagccgtcccgtgaacttctggattccgtccccggcatgcaggaagagctgcgccgccccatgatgctgattatctccgcccgcaagaagtagcgcccccggtcatcagtgccccgcggcggaagctccgggcacttccctgtccagttccgcacggatgcgctggcgttcggaaacgatctgttcgtcgtccgcgccgccttcccgcaggaagtattccgccatggacagagccacttccgattccgaggagaagacctgggaggcgccggcttccttaagcacgtccacgtccctcatgtacttggtgtggatcatcacgtcaatgtgggggttgagctccagagccacccccacgatttccttggcatccggaatggaggcggagagaatcaggctttccgcatattcaatgcccgcatggcgcaggatttcacgctggctggcatccccgtaaacgatgtctccgccctgttcacgtatggcggtgaccgtgtctatgttcatctccacgatgatgacttccaccccgttgtcattcaatattcttttaagaatgcgccccgtagggccaaaccccaccagcaccacgcgccgcgcgtccggcgacgggagcgccaggctgttcactccgcccagatccgtaaggccgatgccgcgcttttgcagccacttgaccacagggccaatctggcggtacaggatgggattcagggaaatggagacgacggccgccagaatgatggcctggttggcgtccggcggcagaatgttgtacatgagccccatcccggctaggatgaaggagaattcacccacctgcgccagggctacggatacgctcagcgccagcggcagcggacgccgcaggcaccgcaccaccgcataggccgccagcggcttgccgatcattaccacccccagcgtcgccagggccagcggccagcaatcccccacggacatcgggtcaaacatcatccccacggaaacaaagaagagcacggcaaaggcatcccgcatcagcatggcctccgccgccgcgcgagcgcaaaagtccgactgccccacaaccatccccgccaggaacgctcccagcaccatggaagcgccgaagaatttcgcggagcacaccgctacgcccagagcaatgaccagcaccgccagcgtaaacaggtcccgcgctcccgtccgcgccacgtagcgcagcaccagcggaatgattttttttccggcaaacagcgtcagggccaccagcagggacagcttgacgaacatccagcccagttcgtagagaatgccgctccagtccccggcaccgctctggcgcgcctccatcacggcggggatgagcaccagcagcagaatggtgaacaggtcctccaccaccagccaccccagggccacatggccgctcggcgtatggaggttctggttgtcttccaggactcgtgtaagcactacggtgctcgccacggagatcgccatgccgaacaccagcccggaaatcgtggaccatccgaacatccagcccaccagtacccccagcaccgtagccacggatatctgcaccacggctcccggcaccgcgaccctctgcacggcaatcaaatccttcaaatgaaaatggagccccacgccgaacatcagcagaataacgcccagctccgcgaactgctccaccgtgtgggaatccgccacaaatcccggcgaatacggccctaccactaccccggccagcaggtacccgaccagcggagacaaatgcagttttctggcaataaggccgaaaaggagagcggcggtcaatccgccgacaaaagtgaagatgaggctgaaatcgtgatccatacgcgcgtgacaagtctaagagggtatctttgaccaccaggtcgttcctacgctatcgcgtttgatttcccctcacaagaacgcattgcgccgcactggaatgcagtcgcatttttcttgccggggggaatctgcggcaggaaaaacggggcctggcaggattctatcatatttttatttttattaaaaactccgtttttattgtattttcaatcgtttctaattgactttacgcatacgggattcctataaagcgtgttgatgaaactcaccctatctatcctatcctgtctgacgggcctctctaccctggcccccatgggctgggcagccacccatgaaatcactaccaagaacttccacatcacgctcctcggcaacggggacggtccggcggactggatggggacccgtgactggagtgacgaccagatagccgccgtcaccaccaccctcaatatctgggacgataccttccgcaacaccgcttcccggaagattgaagcgaccatttcctggggggcccttgaagaaggcgtcctggcaggttctttctccaattacgtcgaatacgacggggaaaactacaatgcggccacttccacggaagtcatctggaaagaaggggaagacgtcgtgatggaggaaggggaaatggatttcaggctccaattcaatcccgtctacggtttcagcacaggcaataccacgccccagaacgccacagacttcatcagcgtccttctgcatgaaatcgggcataacgtcggcttcaactcgctgaatgatacaggaacatacggagaatactacacgatctgggattccctgatcacggatgcccagggcaaccatccgggagatgcgggcttcaattaccagaccggcgtttcctacacgattggttccggaggcctcactgtttacaatccctttgttttcgctcccggttccagcatgtcccacgtggacgctgcaagcgacccgaacgccctgatgcaatattccatcggggagggcatccagaggagaaaccccagcgaccaggaaaaagccctccttgcggagatgggctgggtgctcaaggatgaccccacctattatgcgtccgtggacggcgcttccatcacggaccagattgacctgaatttcttcacttccgttctcgtcaaccggaacatgaccattgatccgggtgaaggcgctactatcgtcctgccctccctcagaggagacaaggcggaatacaacgtcaccatcactgcggggaaagcgctgaccgtcaatctctccaacaccgccatggactccatctgcgccggagaggtcatcggcaatgacgccaatttcatcaagacgggggctaaaaacctggtgctgggcggcggcttttccaccagcggagctctggacgtacagcaggggggactggtgctttccggcgcttccaacaccatcggggagctgaagatgaacggaggaaccttcggcgtgtcccagcttgccagggaggaagccacagccaaggtcggaaagctgaccggcacccggggctccatcaatcttctccattccacccttactctgaccggaacggacaataccatttccagcggcctcaaactggtaggctccggcaccgtcgccctggcggaaggaaagtcgcttgcctttgacggcagcaacaccattggagacgccatctacattgacggtacccggaacggtaccctgcacatcacccagggaacgctggccttcaccaaccaggcccggatggaaatagctacgctggccctggattccgccgcttccaccctgaacgcgggagccacccggaacattgtcattcattccatcacgggagacggtgttctggccgcccagggcggccaaatcaccctggatacggccaatcccctcacgtggaacggaactctccagggcacgggcacgctcagcaagaaaggagccggcgccctgacgctgggaagcgccggaaacgcggggttccatctggattccaccagcggagccatcatcctcgcttccgaatcctccgcctacggagccatgatgctgaacggaggcggcatttccatcttccatgcgtcctccaccacccgtttctccgggcaggaaggcgctctaacactgaatgacgccaccctggagatgagcggaacggccaatgtcctgacggaaaacgcctccatcaccggcaccggcatcctgcggctgaacgcggattccatgctggccatccgcaacggcaacaagctggacacggacatcactattgccggctccggcctgctggccgtccaggaaggaaccttcaccctgtccggaaatgccaggtttgacggagcggcggtcgccgtgggtccggaatccgctgccgccgcgctggacctgggctccacacgcaattccatggtgggcggcctgctggggaaaggctccgtgatcttcaacaacggggaactcgccctccatgcggaaaaatcctccgttttttccggctccttccaggggaacggcacaatcaacaaggcggggaaagcggcatggacctacaccggcgcggggtcagacaccctgaacctcaacattacggaaggggaagtggccctgatccgtgattcagccaatcccattctgctccattccctgacggttgatgccaccgggacgcttacgctcgccatggcctccgccggagccgcccataataccacgcttctccttaacggaacaagccagttcatgaacggttccaccatcacgctcgtgattaatcccctgctggcgcagaccaatactcccttcatttccacggaagacggagccacgctgaccattcagggagaccgcaacgggaccaccctcaatattgaatccaacgtcgccgcgccggaaaggatgctggaactggttctctttgaagggaacatggtgggcagctacctcaatatcaacgcttacggcgcgctgggcacctattattccgagctgcatgcggaaaaccgggacggccaaatcgtgctgacaggaacccgcaaggcggacaacgccctgctcgccacggctgatacctccaattccgccgccggggccgtcctgctctggaactgcggggagatcaaggacggaacggagctgagctccctgaaccgcgccgtttccaacgcctggaacgacggagattacgcgagggccaaccgccttctgagcgcctccgccggaacggccattcccggcatcctggccgcgcaaaggtccggcctgcggagggaaatgaccttcatccgcaaccgcgcggaaaccatgggcctcaatcccgactacattcagggagaccttccccaggtgaacggctggattgaagccaacgggggcagggattccctggacggttccaatgaaggcaacggtttcacccttaactcctggggaggcaccgccgggctggacgtcaactgctcggagaatttcactttgggcgcggccttctccgccaactatggggattactcctctgacggggctgattccgcctccggcgacctggacacctactacgtgagcctcttcggccactaccgccacaggaaatggggccactccctcattctctccggaggctggtcagatgcggatattacccgcagcgtacgccatgaactgggaagctaccaggccagcttcagcaccaccggcatgagtttcggagccatgtatgagctcacttatgacctggttctcaacaaacgccggacggccatccttcagccggtcgccaatgtcagcgtcatgcactcctccgtggacggcttcaatgaagccggcgcaggcggagcgggactccgcgtggatgacatggatattaccaccggaagcgtggccgccggtctgcgcctgaaaggcgttctgggttccaacctgaccgggcgtgatatcacgggagaattccgcgttctggtttctcaggacttcggggaggacaaggcacaggccaacgtggcctacctggccaatccgggccttgtccagaccatcaggggagccaagctcggccgcaccggcgtccagctgggcgcaggcctcagcattccctgctccgactacggcgccgtttatgtggacggcaatgcggatctccgctccggagacacctccatcggcggagccctcggctaccgttacaacttctgatccggctcaggcctgatttgacaagcgccatgcctgcatgtccgggcatggcgttttcattatccgcggcatccacatctcaagccgtcgtgcacgggcttaccacctcccaggctgtttttccggacgcaggtgtttctcgtacgcctttgcgccaggcggttaccgtgttaccgccccatccgcaggaattcctctctttttccccggattattttgataaacattgataatgattgttattttatttgaatttcatggtaacataatttatatttattaaaaataacctcttcccaaattcatggctgaaaattcaacattcgaggaacagtggacccttctcaggaaggaaacgggaatggaagacgctcccctccggcaaaagctggaacacttcattttccggcaatatggccgggtggttttggtgcattacgtaaaagccttgtcggccctggaactcagccatcatttctacctgcggttccgcaggcggagccgttccgtggcggaacctattctttactggaccgtccttgcggaaacaaccatcaacatgacgcttgaaggagtaaaggatgtccagccgtccatcactcctcctgcacgtgccggtgttgtctcccagctcgacatgttaaaagactgctacctcctttatttgagggaccggcagcatccctgctggcctccggcatcccgcagaagccgcatcattcgggacaaatggaatgcgccggagctggaagcctcctattttccccggctgtgcctgaaaaacacggactgccactatgccaacgtcatgaacatactgctgggggaaacgctgcacttcctgactgccctccagcaaatcagggaccacggaaaaaccctgctggagcttaaaaaagagcagcacccggacgcttccccggacggcgctccgtcttcatcccctcgcagcccggaacaacttccgtgcggcaagcgttgaaggcagcctgcgcttcttccgccagagggaaggaaaggccgccggaaccctacagaatcagcatgcaatccccgtaggaaaaaaacctgtaccgttcccggatggcttccaggtaggctttcatgaccagctccttgccggcaaaggcgctgacaagcatgagcagcgtgctctggggcaggtggaaattcgtgatcagggcatccaccaccttgtacttgtagggtggataaataaaaatgttcgttgacccggagcactcccttaacggcagtccttccgcggtagccacatgctccagcacgcgaacgctggtggtgcccacggcaatcaccctcccggcctcattaatcgccctcgcggtggcttcaggcaggaaaaaatgttccgtgtgcatctggtggtcttcaatcctgtccgccttcacgggacgaaacgttcccacgcccacgtgcagcgtcagaaaatcatggggaacggccgccagcagctccggcgtaaaatgcagcccggccgtgggagcggcaatcgccccttcatgcctggcgtaaacagtctggtagcgctccttgtcggacgggtcgctctcccggttcatgtaatggggaagcgccaggcggccgtacttttcctcatccacctcccggtcaaaccggatgaggcggtagccttccccgtcaatgccttccacggtgcccaccgcatcaccgatggagaccgtacgccccagcttcatcttgcgcccggggcgcaccatgcacttccacagcagggggttgagcacctctgcacgcaccacttcaatggcgccgtcattggaaaaataccttgcgggaaccaccctggtatcattcaggatgaaatggtccccttcccgcacatattccggcaggtcgcaaaaatgcctgtgctcaatcaggccggtatcccggtggatgaccatcatccgggaggcggcgcggtccgggagggggcggtccgctatcaactcttccggcagcggataatcaaaatcaatggtgcgcacggccaagtgcattgccacgaatccgccgaaaggtcaatacctttaaaccataggtaacacaattatatctttaccctgcttcggttaatatggtatggaaggatacatgaacaatttgctgttagcaaacatctccaacgccaccgcctgggggaccatcctggtgatcgtcctcgtcatcttcctggtcatcttcttcgccatcatcgccaaattcttcaagacatggttgcgcgcgcgcctcgcgaaagcccctgtctccatgagcaacatgctgggaatgtggctccgcaaagtgccctaccccctggtagtggacacccgcatcacggcggccaaggccggactggacatcagcacggatgaactggaagcccacttcctggccggcggcgacatcgtggactgcgtcctcgccctgattgctgcggaaaaagccggcatcccgctgagctatgaccgtgcctgcgccattgacctggccgtgaaaggcacgtccaagaccgtgctggaagccgtgcgaacctccatcaacccccgcgtcatcgactgcccgaaccccagctccggccagacgcgcctgacggcggtggcccgtgacggcattgccgtggcagtgcgtgcccgcgtgacggtgcgcaccaacctggaccttttcgtaggcggcgccacggaagaaacggtggtcgcccgcgtcggggaaggcatcgtctccgccgtaggctccgcgccctcctacaaggatgttctggaaaaaccggaggtaatctcccgcaccgtgagcgacaagggcgtggacgccgccacggcgtttgaagtgctttccattgacattgcagacgtggacgtggccggcaacgtgggcgcgcgcctccaggccgaacaggcggaagcggacaagcagattgcccaggccaaggcggaagtccgccgcgccgccgccgtagccacggaacaggaaatggccgccaaaacgcaggaaatgcgcgccaaggtggtggaagcggaagcccagattcccatggccatggcggaagccttccgcaacggcaacctgggagtgctggattatgcccgctaccagaacgtagtggccgataccaagatgagggattccattgccaagccggatgcttccccctcttccattaaataaattctcaggccaccggagagaccggattttctctccggtggcccttcctcctttatggattcactggcatacatgctcgcctccggcggcgatgacgacagcctgaagctctggttctggctgatcgtgggggcgatctttctcatcaagaaagtaattgagtttttgaaaccaaaagaaaaagatgaggaaacgcccgtcctggacacggaagaccatcatgaaaaacgcgtgaaggaagtcattgcggaaatgcgccggaccaatccgcagccgcggcagccacagccggcacggccacaggctccggcgcgcgctccgcgcccctccgccccacccgtggagcttcccactcccgccgtggcccgcaagcgccgtcctgaaccggaacccaagccggagtggacggcggaaaccgcccagcaaaccgcccagaacgtgctggaacgctacgtaaaggccacggaagaagcccggcagtccatgcgttccctgtctgacgcggaacaggccgccctgcatcgtttgcaggaaagggaaatgaaggaaagccggcctgaaccgcttcccacggtcgccgcgtccgaacctctttccctgaaaaactccctgcgccgttcccaatccttgaaaacggccattctttatcaggaaatcctgggcaagcccagagcgctccggggcatttccttcagcggggaataatagaggggaggagggggtttctccctccgtccattcaaaaaccggtttttcctggatttgaaggaaagttttcagaatattttttatcgggaaggttgtatgaaggccgggaaaccggacaagtccggctggatggaaagctcatcttgaagcccgcagggcgggtaaatctggaagatggatgaatcaacctttcattcccagtcggaggcgctcgtccatgccgcggcaactcctgcctttttcttcattcccccttgcctggaaaggaaaggggaggtacccttcacccgcaatgacagattcacctttgcagatagccggacgccaattcacctcccgcctgatggtgggaacgggaaagttttcttccaatgagagcatgaaagaagctctggaagcttccggctcccaaattgtgacggtggctctgcgccgggcggacctgacgggctcccatgaccccgccgccaatattctggatttcatcaaccctgaaaaataccttattctcccgaacaccagcggagcgacaacggcggaagaagccgtgcgactggcgcgactggcggcggcagccggactccccaactggatcaagctggaaatccatccggacgcccagtatttgatgccggaccccattgaaacgctgaaagcggcggaaatcctggtcagggaaggcttcacggtgcttccctacatcaatgcggaccccgtgctggccaaacgcctccaggaagccggagcggcagccgtcatgcctctgggcgctcccataggcaccaacaagggcgtgctgaccagggagctgatcaacatcatcattgaacaggccgtcgtgcccgtagtggtggacgccgggctgggagcccccagccatgcggcggaagccctggagatgggggcggacgccgtgctcgtcaatacggccatcgccgccgccggagaccccgcctccatggcggaagcgttcgcgctggcctgccgcgccgggcgcatggcccatctggccggccttcccgccgtttccgtccgggctgccgccaccagccccctcacttccttcctgcattaaaagtgcaacgggagggaaagcgtttctttcctaaccccccacagcctaggaagccttggaagcccccttcgccagctttttgcgaatgaaaaattccagaatgaaacaggcggccacaaacaggaggatcagcggaatcagataaggctggctgaagaacatctggtagaaaaaggctcccagaataaacagcatcagcaggaacccgaggatgatcagcagcgcgttcccctgcgtctctttccggagccgccaatgggcaacgaacaccgccaggtagctgatcaggaaacaggcccccgccagattggcgatggctaccaggttaaaggcattcgtcatcaccagaatgcccagcagaagatagaaaaagccttccgtgccgctgccccagaaaggctgcttgaagatggctcccagctggccgttgcgcgccagtgcccgggaaatgtccagcatgctgaacatggtggcgttaatggctgacgccgtggcaatgagcgccgccacggatacggccatgaagccccacacgcccagcacgggataggcggcctgcgccacggcggtttccgtgtggctttccagggaagtggcgggaacgttggtcagcactacgtaggaaagcaccaggtacagaaccagcacgatgccgatagccaggaaaatggccttgggcaatgttttggaaggatttttcagattgcccgccgtattggccatcatgccgtagccggcaaacgcgaaaaacgtcagtcccacgctccccagcagcccgtccagtcctttcaccggaatggggtccgcgcccactggcacggaagaaccgaagctggcaagcatcagaaccgtcagaataagcagcttgaacgccaccatcaccacctccgacttccctacggccttggctcctcccatgttcaatgctcccagcagcagaatggccacgctggcgaaaagggcggtggaatagatgttggttaattcgtccggcaaaaacaggcgggacgcataggccccgaaggacttggcgaccagggccacggtaatgaccagcgttcccaggtaaatcagcgtcagcgcgccggagagggtcttatgggaaaaagcctcgttgaaataatccatgattcctccggaaccgggataacgggaacccagcttggcgtaggtataaccggaaagcagggccgcgacgcctcccagcaggaaggaccagtacacgtttttgcccgccatcagggtcgcctgacccatgagggcgaaaattcccgctcctaccatggaacctattcccaatgcaatcacgctccacagggataaatattcttttggagccttcccgtgcataagggaattagagagcttacagggacggaacgttgacctttccatacgagatgacacgtcctgccggtccggaacgccccgcagcgtcatcatgactattcaggcacggctttccccttgaaccgtccgcaggcggcatgtagggtacggctgatgatcaaaaccgccatttttgattttgacggaacgcttgcggataccatacccctgtgccgggaagccttccgccgcgccgtccgggaactggacggcagaacgttgacggatgaggaaatcgaacgccagttcgggccggacgacctgggcgtcatccaaagactgcttcccggaaagccggaactgcacgaaaaaggcagggaactgttcctccgctattaccatgagctgcatccggaactggcgcccactcccttccccggggcggccggactgctgcacgccctgcgcagccgcggcatccgtctggccatggtcaccggcaaacgcctggaaagcgcggagatttcccttcaatttttccatctggccgagttcttccccattctggaaacaggctcccctgagggcggcgtgaagccggaccgcatcaggcgggcgctggaccgcctggactcttccgccggggaagccatctacatcggggattcccccacggacgtggacgcatgccgcgccgttcccatccgcattcttgccgcaggatgggccgcggaggcggatgtaaaggggctcgaagaacggaagcctgactacctcctgacccgctttgaagacctggaccgctttttccgggaacatgatgggaatgagggcctttaatattgcaatcccgcaggaaatcggacaccattactcaccccgttaacaccaatccttccatgactccccagaaagaatccggaaaagagggcctgaaaatcctgctcatgctcgccagcgtcatcgtcatcacggccgggctgcaggcggggaagccggtgctgctccccatcgtcctgtccggctttctggcgatcgtcagttacccgctgaccacttttttcaagggccgtcttcgttttccgcactggctggcggtaaccttcacggtgatcatggacttcggcattcttgtgggcctggcctatctggcccagtacctggggcaggacctggcccggacggtcacggtcaaataccagcccctgatgatggagaaaatccacgaactccgcgccttcctcattgaacgtgactggaacaatctggcggaccagatgcttcaggaactcccggacctgctcaacgggcagcgcatcgtggcgttctccacgggggtgatggggcagctcgcctccatgctgaccttcaccaccctgattctgatcctgatgaccttcttcctgggggaagccccccgcttccggatgaacatcaacaaactgggcaacaacagcgacacgggaatccgcaaattttccaaagctctggccggagtacagaaatacctgattatcaagaccttcattagcgcagccaccggactgctggccttcctgctttgctactacatgaaggtggacttcccgctgctgtggggcatcgtggccttcgcgctcaacttcatccccaccttcggctccatcatcgcggccattccccccaccttgctcgccatgctcctgatcagccccaccgcgggcatcatcgtagccggcggctacctggtgatcaacacggtcctggggagttgcctggaacccatgctgctgggccgccaattcggcatcgtgacaagcatggtcctgctttccgtcatcttctggggctgggtatggggccccatcggcatgctgctggccgtccccatcaccatgctgatcaagctcgggctggaaagctccaaggatctcgcctggatcgcccagctcatcgacaacccccctacgcccagattcccgctccctcctctccattccgggaaaaccaacgaaagcacaaccaaggaataatccatgcattcattcgcatataaaaacggcacgctctactgtgaaaacgtcaacctccaggaactggcggacaaggaaggcacccccctgtacgtctacagcaagcagaccattctgaaccatttccaccgcctcagggaagccctggcgccccttaacgcggaagtggcctacgccgtcaaggccagctccaacatcgccatcctgaacctcatggcccgcaatggcgcggggttcgacatcgtttccggcggagaactctttcgcgtcctcaaggccgggggggacccttccaaatgcacctatgccggcgtgggaaaaacagaggcggaaatccgctacgccctggaacagggcatttactgcttcaatgtggaatcggagacggaactgcgcgccattgacgccatcgccgcgtccatgggagtaaaggctccggtagccgtgcgcgtcaatcccaatgtggaggcgggaacgcacaaatacatcaccaccgggaaggctgaaaacaaattcggcgtggactttgaactcattgaacctctttacgagatggcggcccgcgaacttccgaacctccaactcaagggcctgcagatgcacatcggctcccagctcacccaggcgaaacccttcctggaagccgtcaggaaagtggctccgctggccgccgcgctgaaagaaaagcacggcatcgaattcttctccatcggcggcggcatcggcatcgtttaccaggatacgctggattccggcgtcaaggaatggtggaatgaagactgcgcccagctcacgctgagcacttacgcccaggccgtcgttcccaccctccagcctctgggcctgcatatcatcgtggaaccgggacgcctcatcgtgggaaatgcgggcgcgctcatcactcgctgcctgtatgaaaagactggaaaggccaaaacctttaaaatcgtggatgcgggcatgaacgacctcatccgccccgccctctaccaggggtatcatgaaatcatcccggtcagggaacacctctccgaatcctgcattaccacggacgtcgtcggccccatctgcgaatccggggacttcctggcccagaacagggacatgacggacgtgcgccagggagaactcctggccgtgctgtccgccggcgcctacggtttttccatgtcctccaactacaattcccgccccatggcggaagaagtgctggtggacggaaaccagtggaacgtcatccgcagccgccagacctgggaagacctcatccggggggaatccattccggaataacctcccgcgcttcatctttccccactttcaaaggggcgtctcacgaagataaaaaccggaggagggacgtcccttttcctattattccatgttgacggaaaaaatcattttccctttcctccacgctgtcgcttcactttcatccttccggcggcagcgccgccttcagtaatactaattcggttccatgccatcattggcctgccaggggaacatgacggcatggaaaatccttccacccggtacgggacgagaaaaaagatattttctcgcctccctggccgtatactggaaatgaaatactacctgcggacagcatgcggcatcatcctgggaacaatggcctgtgtgcaaggcctgggagcgacggcccatcatgacagctgcattcaggaaggctggaaagaagaaattccccagccggtttaccctgacaaagacctcgtggatctttaccataaaacatgggaaatcacggccggacgggtaagaaaaggccctgagggcctccccgggtcgccctacatggatgaaaactgttacgaagaccaaatctggatttgggatacctgtttcatggtgctctttgccaagtatgcgccgaactcattccccggagagggaagcatggacaatctgtacaaacccatttgggataaggaaaaaactccgcttcgcattcacctcgtggacaatcctccgttgttcgcatgggttgaaaaggaatactacgactttaccggaaacaaaaaccgcatccatgaaatcctgaatcggaaacagtaccttcaaaaacattttgactggtttgccaatgccaaagcgggagaacgtttcgaatgctctccccaaaacatccacctgaacgccattggtgaagatggttttacatggacggggggcgccagcggaatggacaacacgcccagaggccgggacgcaggcggctacaataagattctatggattgacgccatttcccagcaagccctgagcgcacgctgcatggcccaattggaacaatcactgggcaatgcaggcgcagccgggaaatgggaggccgtctaccgcaagctgaaagacaaaataaacgaactgtactgggatgagcaggacgggttctactatgatgtggcgatagaaagcaggcagccctgccgcatcaggacaatggcctcctactggccgcttttagccggagttgcttcgccggcccaggcggaaaaaatggtaaaataccttcgggacccgcaggaattcggtggaaactacccgacgcccaccctttcccgcagggatagggattaccatgaccaaaccggggattactggcgcggcggcatctggctgcccaccacgtacatgactgtcaaggcgcttgaagaatacggctaccatgaggaagccgacatgatcgctgaaaaaatcatccgccagcagcttgccgcttaccacggcatcaaaccgcacacgatatgggaatgttacagccccagtgccaacgagccgtctaccgaacatggccgcagggcccgtccggaattttgcggctggtcggcgctgggccccatttccctctttattgaaaacgttctgggattccataaggtttctgcactccggaatgaaatccagtggagattgaaaagggagaaaggcaggcacggattaaaaaatcttcatttcgggacgactaccaccgacatcgtttttgacggcaaaaacaccgttgacgtcacaagcaacaacccttattccctggtgattaacggtaaaaaatacgccatcaagcccggaaccgcctccatcaccctgaaataacacacccggccggacattcccggatctccaaaaaaatccgtgccacggcctcagccctgcagctttccggtccaccccggcaccggagacaggacttctttattccctccagggcaaatcccgtaaagccgccttgtaaacacccgcggaatatactatttacgttaaaaattttccctcccttttttcctcatgttttccaaaagcctctttctagccgcaggcctcctgtccgcgtccgccgccttctccctgccctccaaacccgtaccgggcgacccggccatcatccccctcccatccgcgctggacgtggaaaaaaacaagccgggatttctggtcagcaacacgctgcctgtttccaaaacgggagacaaaagctgcattgcctccttcgtgacggggttctccaacaacctccggcaaatcaaggtaagcccggctccttccgcggccaatgccgtacagatcatcctgaaaaaagacgcttccctgtctccggaatggtactccatcaaggtctccacgcagggcatcaccgtctcatgcacgtctcccgccggagctttctatgcggcgcaaaccctcaagcagtctctggaaaaggatgccgccggccactgggcccttccctgcatgaccatcacggacagtccgcgcttcacgtggcgcggcatcatgattgacagcggccgcaatccccgttccatcgcggagctgaaaaccatcatcgacctgctcgcctgctacaaggtaaacaccatccactggcacctgacggaagaccagggctggcggctggaaatcaaaaaatatcccaggctcacctccatcggcgccacccgcccggaaagccccattcccggcaaccgcaacaagggagacggcaaacccttcaccttcttctacacccagaaggaagtaaaggagctggtggactacgccaaacgcaggcacgtcaccatcgtgccggaaatagaaacgcccggccacgccgcggccgccatcacggcttatcccgaattcggcaacaaggacatccccggctacaagccccgggtggcgacgcgctgggggatcctccctttcacgttcagccccacggaacccaccttcaaattcattgacggcatcctagaagaagtctgccagctcttcccggattccccctacatccacataggcggagacgaagcccccaaacagcagtggaaaaactccccccaggcccaggaagtgatgaagaaaaacggcctgaaaaacgaacaagagctccagagctacttcatccaccgcgtggaaaagctggtcaacgcgcgcggcaagcaaatcatcggctgggatgaaatccgggaaggcggcctttccaagacggccaccctgatggtctggcatgatcccggcattgcccgggaagccatcaagcacggaaacaaggtgatcatgactccctttgaaagcacgtacctgatccggcaggaagggccgcatccggaaggccccgaatatgaaatggcgactttctccaccattcccctgcaaaaagtctataacatgaatcccgttccgaaggggctcaccccggaacaggaaaaaaacatcctgggcgtgcagggaagctgctggagcgaatacatgaccacactggccaaatggcagtacatggtatttccgcgcatgttcgccatcgcggagctgggctggacgcagcctggccgcaaggacttcacagacttcaaggaacgcctggacaggcacaagcccttcctggacgcgcagcgcgtcaactaccggacggactccggagaaccggcgcagccggaggcgaaaatgatccgcgaatgaccatgtcccgcaagagctctgcaacccctgcgcgcgcctgagttcagccttgccctcccgaaaaaaaacacctatcatgtccccgttatgccaatagccacaccagaacaatacattaccatgcttgaaacggccaagaaggaaggctatgcctatccggccgtcaacgtgaccacgatcgaagtgatcaacggcgccctccgcgccttctccgaagccaagagcgacggcatcatccaggtttccatcggcggcggcaaattcgcctccggcacctccatcggcagttccgcccttggcgccattgttctggcggaagccacgcgccgcctggctgaaaagcacaacgtgcttgtagccctgcacacggaccactgccagcccgaacacgtggacaccttcctgcgtcccctgatcgccgaatcccgccgccgcgtggaacgcggtgaagcccccctcttcaactcccacatgctggacgcctccacgctgcccatggctgaaaacctcaagctttcccgtgaactgctgaaggaatgcgccgaactgggcatcgtccttgaaattgaaatcggcgtcgtgggcggcgaagaagacggcgtggacaactccggccaccccgctgacaagctctacacctctccggaagacatgctgatgacgtatgaagccctggcccccctcggcaaattcatgctggccgccaccttcggcaacgtgcacggcgtgtacaagcccggccacgtcaagctgaagcccagcatcctgcgcgacggccaggaagccgtggtcgccaagcacggcgaagcggcccgcatgcccctcgttttccacggcggttccggttccgaactctccgacatccgcgaagccgtttcctacggcgtagtcaagatgaacatcgacaccgatacgcaatacgccttcacccgcccgatcgtctcccacatgtgcgaacacatcaacggagtgctcaagattgacggtgaagtgggcaacaagaaggactacgatccccgttcctacctcgccaagggtgaaaagggagtcgccgcccgtctccaggaagccgcagacaacctcatgtccgccggcaagaccctcttcggcaagatataaacagcccttcaacggctttgatgcaatgcccggtttccccaaaggaaccgggcatttttttcgctcttcggactgcggataagaaatccgccaactggacgacagcggaacattttctttgaaccatccatttaatgggaggtttggaagaaaaaaaagcaggggcgttcttttcccatcgctctgcaatcctcctttctcctgctgctaccctttctgcctcaaaaaaacatgttgtctgcggatttcttattcgttaatgttcgttcgactttaagactgactccttttcgacatgagcaacgaactccgcatttttccccccgaggtccactctccacacaaaacaacgctgaaagcggtcctctccacagctgcaggccgggaattccatcaatacatggatattgaatccaccggaaacgtggacattgacaaagacgacttggcggacgcctggtgcatcttcttcatccataaaatgatggaaacgggcggcgaattctccgttacagggccggggcgcctgtcccgttccctgctggtcaatctggaccgctacgcggaagcctggaaccgctggatgcccaacgtctttcaccgcgtcaccatccatgccgccgagcgagacgactccgctgttccccaacgggacgaagccatttcctgcttttccggcggtctggacgcctgcttcaccgcctaccgccaccggaaaggcttggcaggcccccagacccttaatctgacggcctgcgtgatgttccagggagcggacattgcggaaaacaaccaggaacactttgacaaggctttctccaaggccagagaattgctggaagacatcggcatctgccaattctaccgcatccggaccaatttccggaacatggggatggattacgaaatgacctaccataccatgctgatgggaggaatgcgcgttttcacctcccgcttcggttacttcatggcgggcagcgaagggtcctatgactccttctcctacccctgggcctccaatcccatcacggaccactatctaggctcccacagcaaggaagccgtcacggacggcatggggcatgatcgtacggaaaaagccggactcatcgcgcagtgggataaggccatggccctgctgagatgttgctgggaaggtaaagacgcgtccggcaactgcggcgtatgcaccaaatgccgcctgaccatcatgaacttcatggccatgggagtgcccagggacaaaataacgtgcatgccgcgcaacgccatgaatgaagatatctcccaaattcagtttaaccgccctttccgcgtcctctatgcccaggaaatactcaagcatgccaaggccaacggactggggcaggagccctgggcggtcaccttggaacggcggctggcggaaagggatcttccgccaaccggcatgagacataaaatccgccaactcttccaacactcatgatcacgattaaccatccatccgtacagacagagggaaatgcggttaccatctcctatcccattcttcaggacggccacgcgccgcgcacgctttcgtttacggtagactcccgtttccgtgactttttgaatcccggcagggcggatggagcccttgtggccctgcttccatggatttcccagcagggcggtcaggttcgcgttcttcccgccatctccgcgcacctgtaccacttcggcatacggctcctctcccatatcctgacaggaatagggcctttcctgaaacccgttgaactggcgggagaagttcacgcggaagttctttcccccattcccggctgccgcattggtacgggcgggtccctgggggtggattccctgtgcactatcgcggagctggaaaaggcggggacgcctgtcacccacctgttccacaataactgcggctcccattggggaaaccgggaactgcttgaaggcagacgaaagctcagccggaattttgctgaaaaaaacggtatggaattcgtctggatggattcatccctgtacgatttttatggcaacgagggatatttgaactggtttccctttttggattccggcagtgtgcttgtcctgaatggattaatgaattcatactggacttccgccacctatcatatcaatcatccggatttcaccaccagggaccggagggattactgtgaattccatcttcaatcccacattctatccgcggcggaaacggaacaggtacgtttccacctgcatggcctggatttggcaaggtatgaaaaaacagccatccttgccaattatcctcctgcctgcgacttcctcaatgtttgcctggaacgcgctttcaactgcggcacatgcttgaaatgccgccgtacgatttcccagctttatctgcttggtcatttgcaggaattttccaaggttttcaacttgagggcttttcaagacaagccgctgcgcttcctcgcaaaaacgattgttcattcaggccacttccagcaggaaatgctttatctcttgaagcattccacagtcctttccccatctgaaaaacggcaggtatggttccactgcatcagaaagcagccttccctgttgtcccgaagttcccagtaacccaacctccttccgattccggtttcccatggctacttcccagctcattccacaacaacaggtcgatattcaacccaatgggacttcccgcctgtattgcgattttatttctcccggttataactgccgggtatgggtagacctcgcacccttcgaccaggcccccacagtggaaaacaattttgcagacgcatggatcaggatgctcatttttgaaatgatgcatgtcggaggccgttttgaagtgaaaggggccgtcagtcttactctgcttcggaatttggagcatttcatggaagcctggtcgcaaatgcatcctgagtatcttaacgtggtagatatcaagccggaccggattatagacgacagaaacgcgccggtggacgattctgcggttgccctcttttcccaggggctggatgcgaccttcgccttgtacaggcatgcatccccacatcggaaaccgcggtatgattccctggatgtgaaagcctgcctgctggtacagggcggagaccggggactttacgaagaacccctgttcctgcgctgttatgaaaaagctctctctacgattgaggaactgggcatcacgcgccttctgcgctgcggaagcaattatcctgaaattttccctctggatacattctggaacaaccagcttaactggggatttcactggcaactggttcatctggcggctttgacaggcatggcatccttttggcaaagggattatggcaatgtactggtggggagcacctatccctattcatccggcgtagtggattttggctccaactttgtgacggcccccctcctttcttcccggcgattccgtgtgtatgaagaaggctggggattcacccggagccagaaggcaaaattggtcagccaatgggaaagaggactgcgcaacctgagagtatgctggcactccaatccggatcaggacaattgcggagtatgcgaaaaatgcttccggaccatcctgaatttcaaggcctccggagctttttatttacgcgatatatctttggatgaaattcgcgacaaggagatatggaatgaacacatcttttacgaataccagaccattctggaagatgccgaaaaatggggaacttctcaggaaccgtgggctcaggcattaaaggaaaggctgtccctgggtgtgtacccggcgcccaagccattgactttccctcaacggatgggaaagagaatcaaacacttcctgtactataaaaaagaagatgcggccagcgtccgcatcaagattcttggccttcggatctataaacgtaaaaaagagggtcccctgcatcaaagccgcgaatgataaagcctgtcgccatgcaagcgcgcggcggccataaatatcctcaaaccacccgcttcttgcaaatccgcaagccgcagaccttgacacggagcactccgttctcctccttgcggtaataaaggtacttggacaaagcggcggctttccctatctgccgcgcatgcttcgccttcctttcccggcagcggtcgaggtccggtacagtcaaaaccttctccagccagggaaattcactcaactcattcaacagatgtacgcggggaaaacgctcccgcagggacaactcataaattccggaaattttgccgtaaacattgtccatcagaaaaacctccttgcccagaagagctccggaaatgcccagatggagcctgtccgtcaagatggcgtcaggctggtccagcgccttcaaaagccagcgggtataggcaaaagcgtgttccacctcatcaatcacgcgtacggaatacacggaaaggtccgtattcaaagggagttccttcaacgcttgagcgtggccggtactttccggatcatctcgcaggcaaacggcaagctttccggcgccgggcaacgctaccaaggaagtcttgacatcccttttcatgcgcttgccccacgcccgttcctccatctccagaaaaggcagcctgacgggccgcttcttcagcatctcgggctccgcggccacggccatgtcatccgccagcaggaatcgcgccttcccattccttgacaggcagtagtcataactagcccgttcccggcaaaacacggtaaaacgttcatccagcacatccaccagttcatcacaatccctgaagctctggggcaggatcacgcacttccggaggcgcggatccgaaaaaaggcgtacataatgaggcagcatgccaaaataggggacaaaacctcccccgccgccgtaaaccagcgttatttcctcctttcctgcagggagttccgggccgcatgaactgaaattcagctcttccctttcaaacagggcgaccgtggaagcggcaatcagggcatcccccacattcccctggttcatcatgtaatggaacggccccagctcacgcagaagctccatcatcgcgtgaacagggacaggggaacaggaaatccggctacaatccatcgccctgattctaccttaccggccatcaggacgcaactacataggacggggtcgcctctccggcgttccggcacctctagttgccagctttgcgggactccctcacgcggtcattggcgttcaggatgcgcttgcgcaggcggatgaaatggggggtggcttccaccagttcatcaggctcaatgtactcaatggcgcgttccagggaaaaggcgacgggaggggaaagctggatgccgtcccccttcgtggcggaccggatgttgttcaggtgcttttccttgcacggattgaccggcatatccatctggcgcgggttttcaccaacgatctggccttcgtaaatatcttcctgcggccctacgaacagacgtccgcgttcttccagcgccaccagcgcgaacggcgtggaaacgcccgtttccatggaaaccagggtgccggtggtacgcgtggtgatatccccggcgtaggggccgtaatcccggaacaggtgggagaaaatgccgtggccggacgtcaggttgaccagctcaaactcaaatccgatgatgccgcgggtgggaatataggcctggatgaaggtgtggcccgtgccctccttggaaatcatgtcttccatctgtcccttgcgggcgtgcagaagcttcatgacgccgttggcgtgctcatccggaacttccacgtaaatcgtttcatacggctccgtaagacggtcaccttcatccctcttcatgatcacggtgggacgggaaacgcacagttcgtaattctcgcggcgcatggtttccaccagcacggcaatctgcatggccccgcgggcggaaacggagaaaacgccggccttgtccgtatcctccacctggatggaaatattcgtccgcatctctctcatcaggcgatcgcgaatcacgcgggaagttacattcttgccgtcgcgtccgccgaaaggcccgttgttgatggaaaactccatggaaatggtgggcgggtcaatcgccacaaacgggaggggctccgtatccgcggaaccgcccagggtctcaccgatgttcacgttttcaaaccccgccacgcctacgatgttgcccgccacgccgatggccgaatccgtggtgcccaggccggaatattcaaacatgcgggtcaccttgccggaaatgcaggtgccgtcgctctggtgaagccatacggtatcccccttcttcacggtgccggaggtgatgcggccaatggccacgcggcccacgtagtcgtcccagtcaatattggaaacgagcatcttgaactccccttccggatcggcatccttaggagcggggatgtgctccacaatcttgaacagaagaggcgtgcagtccacaggaggttccccctccatggaattcatgaaatagccgtcgcgggcggacccgtacacaaagggagcttcaaattgttcgtccgtggcgcccagttccaggaaaagctccagcacctggtcatgcacggcggcagggtcggcatgggggcggtcgatcttgttaatgaccacaatgggcatcagcccttcctgaagggccttgcggagcacgaaacgcgtctgggcctgcggaccttcaaaagcgtccaccaccagcagcacgccgtccaccatcttcatcacgcgctccacttccccgccgaagtccgcgtggccgggggtatccacaatgttgatcgtgtagccgttccagaggatggaagtattcttggccttgattgtgatgcccttttcacgttccaggtccatggaatccatggcgcgttcctgcacggcctggttggcccggtaggctccccccgcctgcaaaagttggtcgaccagggtcgttttcccatggtcaacgtgagcgataatggcgaggttgcggaacttggaagggtctgacattgcgcgcgagagctaaaagcactggaaaataaatgtcaagcctgctccatgaatacctccatatatttttaacgcgcgcgtgcctctcccgttgcaggtgacggaacttttgttctctccggtgaatttatagcttccccccctcttcaaatggggctatcctgctctggcataaataatttctaaattctagacaacgatgaagatttggttagatggaaagctggtggaacaggaggaggccaagacctccgtttttgaccatggtacgctctatggagacggcatttttgaaggtatccggttttacaacaagcgcgtcttccgcctggaagaccacatggaccgcctgtacaactgcgcccattatctgctgctggacattccctatacccgggaggaactctccaacgcggtatgcgaaacggcggcggcttccggcctgagcgacggctacatccgcctggtagttacccgcggcattggcaacctggggctcaatcccttcaactgcaaacgccccagcgtcttcatcattgcggataaaatctccctgtacgatcccgccgtgtatgaaaacgggctgcccctgatcaccagctccgtgcgccgcaaccgtccggacgccctctgcccccaggtcaaatccctcaactatctcaacaacatcctggccaagatggaagctgtgcgccagggcgtagcggaagccctgatgctgaacgatctgggcaacgtggccgaatgcacgggagacaacatcttcatcgtaaaagacggagccgtcttcacgccgcccgtcacggacggctgcctggacggcatcacgcgccgcgtggtgctggaaatctgccgggaactgcaaatcctggcagaagaaaaaaccatgaaccgctttaccatcacctgcgcggatgaatgcttcctgaccggcacggcagcggaatgcgtccccgtcaccaaactggacgcctaccagctgggttccggcaaaatcggtccggtgaccgcccgcatcctggcccgcttccaggaactgacccagaccacgggaacagccttctaaagcctggcatttcctttttgatagcaaaaacggcccctcctgtccgacggggccgtttttttgcgccactgcatcaaaacccgaaagcggcgcaacgccattccatgaaatgttcagcttgaaatccacaggaggagtgaagccggaacatgaacggatcaaacgcctgtttttacagtacggaccatcaggaaacacggtaaaagaacacatcaccccggcataaacggaatgcgctcacccgggaatgaatgcctcccggcctttagggcatactccactccagagcgaagcgaaaggattctttaaaaagccgtctccgccttatctcccacgcacaaggacaaaaccggacacgttccgcttctgcccccataccggaaccgttccagccaggaaaaaggcgggattacttcttcttcggcaatccggtttccggatcaaactgcttggcctgctgggcgtgctccttcgtctggtagaaacggacgtaatcaatcaggaacttcacgggataaccctggccatccttcggagccttttcacaccagttgccgcccacggcggaattgagaatgaggtaaaacggcgtacggaacggattgcccgcctcattggcataattagtggtattcagatcaatggatttcaccagcttgccatccaccatcagcttgatggaatccttgtcccactccatgacatacgtatgaaaatcatcggagaggttatcaatcttcaccgtgcctccgcgggaagcatccttcttggacacgccgtccgggctcaaatggaaggtggaataaaccacatccggctgctgggaaatattctccagcatatcaatctctccattgacgggccagccccacttgttcttgccaagcagccagatggcaggccagatgcccttggttctgggaaccttggcccgaacttccagtctgccgaacatgaaattcttcgtcttgatcgtcgtcacggaaccggacgtgtagggcatgaatttggtattcttaatccagtccgacggactcttcttgtaattgatattggcgaacttctcaaagtgggtctccaggaccaggcagccgtcttccagcctcatgttcttgggccgtgctgtataggtctgctgggacccctgattgcgtatcacgcccagctccggcttccacttcttggcgtctatcttggacccgttgaactcgtcaccccaaacataaacccatccgccgggaagggtcttcggaggcttggcgtcttctccctttacggacatgcacaggcatgcggccaacaacacggcaaacaggctcttcttcatacggaccaatactgtacttggaaccgcagcctttcaaacaaaatacgtccggacgggcgccttttccctcccttcccttgcaggatggcggaaataccctgtaaaatggatagaaactctcttccgccgcatgctatgattacggtatgaagaccactccttcaccccgtggccgggcccttcttcatcaaacccccgtgggggccatcgtcatcgtggaaaacggaacggccgtcacgcacgttttctttagccgcttggtgcaaccggagcatgtggaatgggaggaaacgcccctgctgcgccaaacagccagccaactggacgaatactttcaaggtgcccgccgcatgtttgacgtgcccctttctccgcagggaacggaatttgagcaaacggtctggaaggcccttcaaaccatcccccatggggaaaccagaagctacggcgatatcgcccggcaaattggacagccatcagccggccgggccgtggggcatgccaacaaccagaaccccatcagcatcatcattccctgccaccgggtcattggagccaatggaaaactgaccggttatgcgggcggcctgactatcaagcaatatctgctggaactggaacagggtgccgtggctcccttcatgctgttcccggatgcggaacgcgcccgatggaatacccctgccagctcgtgaaaacggcggaaaagcttgaattggcctactgctgcgcggcgtccgccgcctgcggaggcgtcatggacttcaaggcagccttgggagactcaatgccgagccactgaaggggcagcaattctcccgtcaccttgtaatgcttgtaagtcaacccggcaaaaacggccaggaaaaacatcaggacggcatacagggccatccacaaataattcttccgcgccgtacgggtggcctcgtccgccaattgctgcaaattccgcatggcggcggaaggagctgcctcttcctcccccgcttcggtcggctcgggaatgagtcccggagaaggctcttcggcaaaccggagcctggcatctcccagggcaatttcgtcgccatcgtaaagagaggcggcgcccatgggcgtgagcccgttgatcttgattccattagttgaacccaggtcttccagaacatacgcgccctccttgaactgaagcagggcgtgttctccggacacggactgaaaaggcagcactatttcacaatgttcgtcgcgtccgatgcgggcgaaatattcgccgttcttcggaagaacgatggttttctcggaaccgtcgggcaattggatggaaaggcggggcatgattcacgggcatcatgccatgccgacgctgattttcaatccaaaagaccgtttgcccggcatgcccgggaaaaaagcggttgcatgcgcctctccttcagaaggcggattccatgaagttccatcatgcggctccatttttccagacttctgaccagcaggagtttcccaaaagatattcttaatagataattcacacactttaaatcccctatataaaacgtccctccggatagggaattgacatcccggacccgcggcggctaacatcaggcatgaacgccacgcaagcatcagctttcaagggatacaatctgctgacggccgccaaatcggtaatttccaaatacgctgtattttccgggagggctacccgttcggaatattggtactgggtattggggcagactgccgtcctgctcctgttggacatggccttcaccatcttcatgatcatcctgtttgcctgccatcatccgcagcaaatgtcatcaactgaaacttttacctatggcatggcaggtgccgttccccttctgctatggagtctatttaccgtgattccttcgctggccgtcacatgcaggcgcctgcatgacaccaacaaaggcggaattatgctgctgctttatctggttccgctgatagggagcattattcttctcatttactgctgtgaagacagccagcggggaacgaaccaatacggaccgtcggaaaaatacccggggttgccgtaattttccggaatttccttttgccaaacagctttccggttcactggaaaagttagcggcacatgccatggaaaagccgtacagtcctgcacttgtcttgcgttttggggggaaatgcttcatattcagaacatgtttgttgacaacatccgcatatttgccagggcaggaaagggaggaaacgggctggtcagcttccgcagggccaaattcgtgcccaagggcggtccggacggaggagatggcggcgatggcggaagcgtcattctggaagtggacccgcacacgaatgatctgcgctcctttttctacgaccccaaattgatcgccacggatggagtaggcggacaaagcgccaaaaagcatggcaaaaacggcaaatccgtcatcgggaaagttcctcccggcaccatcatctaccgcagcaatgcctcctccatggcggaggcgacctggctggaacgggaaggcgaaggcatcgagctggaaaaaattgcggacctgacggaaatcggcacccggttcacgctgtgccagggcggcatcggcggcaagggcaactggcatttccgctctgcaaccaaccaggcgcctacggaagccgagatgggaacggaaggggaggaaggcgtcttcttcatggaactgcgccgcattgcggatgccggactggtgggctaccccaacgcgggcaaaagcaccctgctgggagacatctcggaagccaagcccaaagtcgccaactatcccttcaccacgctccagcccatcatcggcgtagtggaattcgacagcttccgccgctgcgttgtggcggacattcccggcatcattgaaggcgcgcacaacaaccgcggcctggggcatgaattcctgcgccacatcacgcgctgcaaggtgctcgtcttcgttctggacatggccggcagcgaaggccgcgaccccattgaagaccttcaaaacctccgcacggaaatcaagctgtacagtgaagacctggccaaacagccctggttcgtcgtcgccaacaaaatggacctggaaggggcggaagaaaacctggccaacttccgcatgcgttttcctaaggtggacgtcatccccctttccgcgctcaacggagaaggcatttcccggctcaagagcaagcttgacgaacttgtaggctataaattcgttcgttaaaaccatccgttcaaccctctctcccttccacatgaccgctccgcttgccgcaacgacagaccccgaccagctcttgtgccgtatcgccggaattggagacctcttcgccattgaaggggaattcgtcaccggcaaggaaatccccagcggccacatcaacaccacttacaaggccacctaccgcaaaagcgacgggacggaagactcctacatcctccagcgcatcaacgactatgtcttcaaggaccccagagccgtcatgcgcaatgtggagaaagtcacgcggcacatcaactggaaagtcctgcgccgcctgaaggactccgccgggcagaccctcaacctctatccggcacgcggcggccgcaactacatcgacattcccggcgacggcatctggcgctgctacaattacctggcaggcacgcatacctacgacgtggtggaaaacacccgccaggcgtaccaggccggatttgcattcggatccttccaggacttgatcagcgacatgaatccggacgacatcgtggaaaccattcccggattccaccacacccggaaccgcttcaaccgcctgatggaagtggcggcgcaggatccgcaggaacgcctttccacctgccttccggaactggacttcatcaaggcgcgcgagcaggacgtggaccgtctgctggacctccaggccggcggcgtgcttcccacccgcatcacccataacgacaccaaaatcaacaacgtcatgctggacgaagatacggaccacgccgtctgcgtcattgacctggatacggtcatgcccggccttgtgctgtacgacttcggcgacatggtgcgcaccgttaccccgcctacggaagaagatgaagaagacctggacaaggtgcgcatgcgcatgccgatgttccaatccattgtggaagggtatctggccgccgcccacggcttcctgacccaggcggaaatagaccagcttgctttctccggaaaactcatcacgctggaaatcggcatccggttcctgacggactacctggaaggagaccaatacttcaaggtttcccgcccggaccacaacctcatccgctgccgcacacagctcaagctggtggaatgcattgaacaggaacttccgtccatggagcaatatgtcaagcgcgtggccaaggggatgtccagaaaatagagtgggagctctccctccttcttttccattctctccgggacggctatgccgtcccttattatttatattatttgaacactgcggcgatttccataatccaagaaacattccacgcaatcgccacagaccatgtttgaaataccggatattcaactcaatcaatatggcaagccggcaaggatcatgtatctggccccgtatgcccccgacgctcccgatttctccaaaaaaccctacacgggcaacggaggctatccccagtaccactacaacatttacaaggccattcaggacatcggctatgacgtcgtctcctcctccaagccctattccgtgcaattcgccaaaggaaacgtggactatgtattctccctgatgaacaggttcggcatgtccaagcctgaaatattcatctcctcgtactgcgaattcatccagatcccctatttgggcgccccgcccaacatccgcgccattgcggaagacaagctcctgaccaagctggtattccgctccctgggcctgaacatgccggagggcatcgggctttccggggaaaaaggcattccggacaaagcgccctttcccggcccctacttcgtcaaaaaacggtttggagccgcttccggcggtatccgggaagacagcatctgcggctcctgggaggcggtagccgcgtgcgcccggcgcctgatggaggaagggcatgaagtgctcgtggaacaatactgcgaaggcattgacgtcacggttcccgtgctggggggtgaaaaacccgtcatcctgggatacgtgcagccgaaatccgacaaaccgggcagcatcatcacggaagacctgaaactgcatgaccacctgggctaccagatagtctccgtgcacgacctggaacaggacatcgccaacgacgtgcagaaagtctgggacgccctggggccgatggactatttccgcatcgactaccggattgactttgaaaaaggcgaacggcgcatcctggaaatgaacatctgctgccacctgggcaaaagcggctccatctgcctggcggccgcagaacacggctactcccaggcggacctcctcaaatacatcatcggctacagcatgaacaggcagaaaaacctctgccaatacggcacgtggctcatctgacccgtatggaggcagcaagccacgctccaatcatggcagaaatggaagggattcatccggtatccggctgattgcttcaaacactccctgccagctttccctggacgcttccagccctcccagagccatgccgcgttcccgggcagcggaggccatatcctcccggtaatgcggttcccacgccatcttggtggcgtatgtgatgaaatcccccgggctttcgcacagccatccggtcttcccgtgttccaccatctgttcccagcctccgcgcttgtccacaataagcacgcttccgctcgccatggcctcaaagcccacgcgcggccaattctccgtcgtatccgtgggttgcagaacgatgtggcatctttggtaaaactcctgctgggatagagacctctggtcatggaacgtctccacccagtcgggcggccttccggtcttcgcctcactccgctgatcaaagccaagaaaagttcctctcttccggacgggtgaagcaaaatgctcgtaaatgtgccacgtgtccttgctgaatttgtcctcatcctggcgggaaatgtgccccgcgccaaaccagtccgtggatcgctggacaatgaagggaaaatcagtcgtgtcaaaatacggcttgaacgtcatgaaccggatggacggatcggcattcaaggctctcaggcgcggcatcacgctctccctcacctggtcattctgataaagaaacagggaaatatcacccctcttcatggcttccttttcccgtccgaaaagccaggtcatgcaattgacaaacactgtctttcttgtccgtttccgtatctccggcagcgcagccaggaactcttcattgcaaaaactgataacgggcgcgccttccggaatagctgaccagtcgtacccctcatgtaccgtgacgccctgcccaaccatttccggatagagctcggcacggtgcacgtttttttgggtgggaatgagatgaatatccacacacatgtgcctccaaaccttaatctggtggtaaagctcggctcccgcccctccatagagggacggaaacccgatgatgtagagagagtccatagttagttattccattgtagaggacatatccctaagaattaacatatgaattgttaccttattgccatgtctaatatttttaaggcattatcacatccatcagtaaaataattatccttattttgaaataatatccatttcctaacgatgctgagttgatcttttgtataggaatgatatatataatctacttctttttgtacgtagtcccgtattctttctgaaaaacaaattataataagtttattcatcatccattcctcagtgtctatcatataattatttgctcctgatatttcctccattaggaattcctgataatagaagggaaaaaatatgaaagggcacaggtcgatgaaaaattgataaactctgcattgtgataccattgaatggcaggaacatcaatccaacgtttatttaaaaatggtttgacacattctgttgcttcatcatcaggataatccggatttccaatgagctcccgaatgttggttgtcggaaaaaaagaatttccaagaggaaactctttttccacttcctgaatcatattattcagactctcatgggaataataagccatatttatattaatttttttgctgccctatctaccaagtcaagagcatgagtacaaccggattcatcgttgtgctttctattttcgaataaaatccaatttctgactaagtcaagttgtttttttgtatacgaatgatagatatcatttgtagtttttatccgccaatgcacttcttctccccaaaaattaattccagttagtacattcatcatccattccctcgtgtcactcatgtaccttttttcatttgctatttcctcaagataagaaagccttatgattgacgggagaaaataggcaagagcactacttgcagcaaaactcacaaactcggcgttatagtaccattgtatagcaggaacatcaatccagcgttggttcaaaaacggttcgccgcattctcgcccttcatcatccggatggtcggggttttcaatgagatcgcgaatactacttgttggaaaaacaggagtttccaacggaaatgctttttccacttcgtggatcatattattgagaatctcggaaggataaatcatagccatgttaatttacgctttttctttattctcatgcaataataactctccgattcatgctagggccagtttcctgcccacagtgcagacttcctgcctaactattggatccatattttgcaggcaaatgtacttaatatcatcatatctctgcctaggggaaaataaaagaacaggtctagcattgattgaattaaactttaatcaaacatgtaacaagcttatgaactgtattctataaaggctgcttccattctactttaaaggatagaagatagaaattatatttatgtttagtacttaaaacataatacttgttacagacctcgaaccaaatcctgctttttccgatccactttttcaaaatgccatcgatattcatcaaaccgaaagcactgttcttcatcaaacgatgtgactggtgggcgatacggttggaaaaacaaataccatatccattcatattttccgtcttccctttcctctggccacagaacaggataatacagataatctttattattccatatgttcaaaccgatctgctttcccagcaaatgaaataaaaatttcacgcataataattctggtcgagagagttttcctacgccttcttcttcaaaagattctttcgattcaaatccaaggatacctaaatccgattcaccgatagaacgcgaccagaaaaatccggccccatctgtcacgccatctgcaacaaacacctgtttagcctcttcttccgtgacaatacttatcactttgcgtacattcacaccctcattattccacactatatcgcctgttctaactggcaagccttcgggataataaatagttttttgcatagaattatttttgttctatattataaagggcctccgccaccagcgggattaggaggggggagggccatccggggcacttccttctggtggagtttgtgtgttttccaaagtaacaggaccattccaattgcatatgcatgatggaaatggagcctgattcatcgtccatactttaacgtgacctacagtatcacacttgtgagctcctctttctctggatcctggtttggcaatgtcatgccgtttcgatccagccgggggcttacagggtttacagcctttccgggtagcgatgacaacagccgcagccgcagccgcaactcttgcagctcttcgagatatattagatgatgatgtaatgcctcgagtcgctcttgctatatccgcgagataagaaggagagttggtcatcgcagcatccggtgttttcactgggatactcccagtataatcgataaacgtgaaaagattattataaaccattctatataaattgaaattaccatcctctccaatgggctccctattcaaccatctaccgtttaaaatattataatatctgtaattataatataccagacctaattcatcatccgcatattcactggagaaacggaagggattatccttcgccatattgccttccatcctgagaacattgccgtatggaccatattcatacagggcgcggcattctccctgggtatcgaataggcctgtagtatttttcagcaggtcatgcgtataaaaaaggttttctacataggttcccgtttcgtcgaatgtggtcattgccaggattcgtgttgccgtggactccataggatcccatagataggttttccgaagaacgggttgcaccgtttccgttgcattggctgcatccagttccgcaagttggagaaaaccacagtaaataaaccgtttccgggacaccagcatttctccttcatagactgttttttccactctcctgttcaggtagtcgtaacggcattccacccgcttggtatcctgcgtgaatctgaccgcctggttcagggcgttatactttacctcccactcgcctgtagaggtttttaccttaatctggttgccgtcttcgtcgtactcccgtatcaaaggcctttcttctccatccgtaatggaagtgtactggttgaggctattcgtctcatagacgattgtaatttctcccgtttcttcctgtgagggttcccgatcaccggaaatgtactggttgagattatttgacaaataaacggtgggagccgcttccgctccttcctgtgaggtcaaccggttaccgatattgtcataggagtagctgtacgttccgccccggttcatcacgtcggcaaccagttcgtcccggtcattatacgtgtaaacatgagtaagatcgggattgggagtattaaagtaatccttcttttccagggggcgccccagtgcatcataagtatagtcgactttagctaaatagtcggcgctcccgggacgctggtaggctattttagtcagcaagtcacgcttttcctcccgggtataccatctcttgagggcgttgggataggtgagcgtttccaacagtccatgaactgcatgatagccgtaggtaaaccggtcgcctgcatgcctgagggaaacagtgccaaggcgtttgtacatatcataattccaaatggtttgaaaaacaacatcacctttgtattgcaaactatagccaggaaatcgacccagactgtccctttgatagtcaagccgactggccaccaaacctgccgtattttcctgtaccgcttcattgtattggttataggaaaacgtgcgcgtaccggaatcatccgttacctgcgtaaggagattgagatggttatacgtgtaacctatggccggcgtggcatcattgtgggtgacagagagcaaattccccgtcaactcatcatagccgtaagtcgtcataagatgagttccctgctcatcaaccgtccgggcttgtgatttggtcaccagcctgttccacccgtcataggaataggtttccccatgcccgtcagcataggtttttgccgtcatgaggccggagacttcatcatagctccacacggtggtatcgccatccgtccgttcacgcggatcacctgcaatggtttcttccggagcccggaaagttttgagttctatcagcctgtctgcatcgtcgtaagcaaaaacagagggctgcgctgccgtaccatattcagcagtcttgcgtccgcgcaaatcgtaagcatagcaagccgttttccccagtgcgtccgtgatgcaggagggcaatgccgtcgccggatcataggcagtcgtaaccgtattgccggcagcgtctgttctcccggtttcgcgtccggcaagatcaaacatgatcgtggtttcattgccgcgtgtgtccgtcaggatttcctttttccccgtggccgtgtaggaacgcgccgcggtcgtagtcatgtttgcgaaatcctttttggagacttcatacccgtcaatgacaagtgcttctgcaatgactatggaatcaggaacctgtttcctgattgtacgtttgccgggagccgtatattccatccattccggaatctcattgcctctcgtatccgaagagatgatcttttcagcaacgactggggacaggaaagagaccagcgtagacgtgcttttcgagtaaggcagcccgtaactattgtagttaattacggtcttcacacggtatatgccgtcttccctccgttcacaggcataggagtattctgttatacgggagttagccggggcaggttcttccgccaacttccatgtctctttcactacgttgccgaaggagtcatagtcgtaaagcatcggggccatgccgtccgtccctttccgcaacagcctgttctttgtatcaaaactgtaccgttcatggatgaggccgccgctggcactggcccgggaaagacggaccacgttgccccagccatccgttacagattgttccatgaggaccggttccccgccttcctgcggtataagggtggaatggagaatcccttcttccatgcattccgtttgataaagcaaatgcctctgtcccgttccgctttgttccaaaatggttccatccgcatggcggcgggtgacaagcgtagctcctgccggcgtggtagcggttttcgtcaatccattctcactataggcataagtatggtctctcccaagcacgtccgtttcacgaacaagctgccccagcaggttgtattcccgcccttcactggcggccatgggaccaacgtcccgccgtatcgccagggttctgccaaaagcgtcccgcgtgtagctgacaatggtttccggagtagtttccgtagccgaacgaatggtttccacaagctggcgggccgtgttataggcatacgtagtcatcactccgtcttcatccttttcccacaaggggccgcaacacatcatttcacgttccgtcacgcgtccgttgccgcgcgtgcgcttgatccatcgcctctccttgtcatattcgtagtccgccgtatctgtcaatgcccaggttccatccatcagaaaagcgtatttttctatccgggtgttggtgccctgtgcggacacgtaagtcaatttgcgcttgctctgccccggcacagcttctcccccaacccgggtttccgccgtaatcctgtacagggcgccgtattgactgtctgcttcatactcgtaagaggtctgtaccccattgacggcctgccgcatcttcaaccggccccttgcatggacattggaagctgagggcatccatgtttccgttatttccacttgctctccttccgcacccagggcagccgtccgcttggtcacacggcgcacatcattggcttcctcataggtgtagtgcgtgtcccttaaccgtacagctttgatggtaagaacgacatattggtggatgatatccggatccggacggtccgagtaccggtaataggtgtaggtgccttttctttcccctccggaccagggttccatgcgaactgtttcacgaccaaaagcgtcgtaggcccacgtcttgacactcccgtcgggagcagtttcccgtgacagttttcctatgctgttataatcgtaagtggtttcccgggcataatcagtgccgtaggcttcaattcggctggtgcaaaggttccccttggaggtctgttcataagtttcacacacgcgagaaatgggtgttcctgtttctccgcgctgaacggtagtgatcaatttccatgtggtggaagtgacagtctgtttttcccgcagggtgtaaatggcgtcttcttcttcaccctgggacatgcaccaggcgcctcccgttccctgccaataacgggtgacatagggggaacggccttcagcctgttccgtgaccgtgagtttgctggttgccgtatctccggaaatggagaaagtcttaaacggaatacccgtgacgggataaacgccattcgctttttcccccgcctgctccggcagataaaaggcaatcacatagccgtcagccgtcacattttctatactggcaaggccatcccacaggttccatatctggcggatgtttccgtcactcccccgcacgatgtccagatattgggaaaaatcctgcgccgtataggaagaaccaagcttggaaacatacccggtagcgttctttagggaagagagtgaagcccctccgtacagaacggaatttcccctgttattgctcacgcgcatttccgtagaaaaaagagaagctgcattggcagtacggctgctctcttgggcgtaagtcatggaaacggagccaccccgtttcttggacccgccactggccgcgccagcatagcagtaataattgacattggtacccccattcctgatctgaaaagccgtgtccgctctcaagctgcctccgggaggcggctggatactgcttgccatcgggtgcaggtattgaagagcggcgggcgtccataatttggaagaaaagttgtaagctacaatttccagcatgccataaggcattccttccatcccccggaaagctccgaaattggtgcgccacaccatgctggttttcctggtctgagtggttacgcgcttaccggcggaagaaatgctgccgtacagggaggcggaagaaaacctgttgcgagctgtgggagggggttccgctcctcccgtgttatccatgcatccgtctgaagaggaaggattgcccaccggctcatcaccgtcttcatctcccccattgttgccgtccggacatggattgctggagctgctgttgggagaactgctgctccctccgctgctggaaccgcatggatcgtcttcgccttcgtcgtcattgtccaccggttccgtttgcgtatccggagggacataggaagaggaagaaccagtctgatggtcagtgacgaccacgttcatatcaaaggtaagcttggcaacattcttcttatggtctttgagggtaatgttttgatattccaaatgagcctcatgcttccctccctcgatgtcaaatgaggtttccttcggatcataggtaccgcctccttccggcccgcgcggaccgaggttcatgatctccttttgatccaccgtcagcgtcgccaaatcatcggcgcccatggtgacaaagcatttggccgtttcagaaggccccagcgggcgcacctcaaattcccaattccaattccggtcaaaagcatccggagcgctttcatcgatgggcgtcggttttcctccgctgtcggaactgcgcgcccctgtcagggaattgatatcgtcgttaaattgttctttcatggttgaaatagattaatcattgattatcaatcattgattgattccaacacgggaatgccagcaataactttatcaattcattacctatgccaactaatttttactcttcaacacgcccaaaacggaatagacgctatccaggggccataagaatatctgccatttcattcactctggcagccaaactacttctttcccatgagaaagaggggattttccccactactgaggaagcttcattgaataccggctgacttcccatcgcccggaataatgaccaatcctcattccgggcataaaccggtcctttcccagcagaacacagcacgggaatcgcttgagacgaaagggaagaataaccttccctcgatacatttttatcattcaggagagctgctccttcaagttctctaaaaggttggcgcagccgtcctggagtaattccaccacatggtcaaagccttcctgccctccatagtagggatccggcacttcctcatccagaaaacgggtggtgaaaaagcacatgggaacaatctttccttcccattgccctcttttgtccagccgtttcaaatcccgcagattctcccggtccattcccacaaccaggtcgaactgttccagatcatccttccgcacggggcgtgatttgactcccggattctgataaccgtatttttccagggcctggaccatcctggcatccggaggacagccgcgatgatagccgatcatgccggcggaatcgctttcaatcaggctttccaaaccttgttccttcaccatcttcttaaaaatgatttccgccgcaggagaacggcagatgttgcccaggcagacaaacaggactcggtagggttcggaagcattcatgagggacaattctttttttcaggataggcaagacgtttccccggatcaagagggaagagtttcctgtacggaaaacagacacacgccgggacaacgcagggagcaaagcgcagaacgccgccgtgccgtcccaaaataagattcccctgtgtttcggcttgcgtcagagggtgtctggctgtagattatcgcatggcagatctccctcttggattaagttttgatgacgtgctcctgctgccccgcctgagcgcgattcttcccggtgatgcggacatcagttcccagcttgttcccggttttgacatgaaaattcccgtgctgtccgcagccatggataccgtttccgaatcagaactggcgattgccctggcacgggaaggcggcctggccgtcattcaccgcaataatcccatcgacatccaggcggccatggtttcccgcgtgaagcgttttgaaaacgcggtcatcccgaaccccgtcacggtgaacaaggacatgacgctggaagaagtccatcagatcatgatggaccagggttactccggcttccccgtggtggacgccagccgcaggctggaaggcatcgtcaccggacgcgacatgcgcggcgtggacgattaccagaacatccgggtcaaggacgtgatgacccccctttcccgcctgattacggcggctcccaccaccaccattgaggaagcgcgccacattctttacacccaccgcattgaaaagcttcccctggtggatgaaaacggcgtgctggccggcctcatcacggaaacggacatccagaagcgcgccatgtttgcagacgcttccaaggacgagcacggccacctgcgctgcggcgccgccgtgggcgtgggccctgattacctggaccgcgccaaggcgctggtttccgccggagcggacgccctgttcattgacgccgccaccggccacaccacccgcgtcatggacgtggtttccaacctccgcaagctgacggaccgccccatcgtggccggcaacgtggtgacggcggaaggagcctccgacctcatcaaggcgggcgtgcaggccatcaaggtgggcgtgggccccggctccatctgcaccacccgcgttatttccggcgtggggatgccccagttcaccgccattcaggaggtagcctccgtagcgcgtcccgcgggcgtcaccgtcattgcagacggcggcatccgctattccggggacatcgtgaaagccctggccgccggcgctgacctggtgatgctgggcggcctgctggccggcacggaagaaagccccggcaaggtggtccactatcagggccgccacttcaagcaataccgcggcatgggctccctgggcgccatgcgccgcggctccggcgaccgctacgggcagaacagttccggcaagctcgttgcggaaggcgtggaagcgcgcgttccatacaagggcatgctggcggacgtggttttccagctcatgggcggcctgcgttccggcatgggctacctgggcgcacacagcctgacggaactccgggacaaggcccggttcgtccaaatcacctccggcggcctgaaggaaagccatccccacgacatcaccatcacggaagaacccatcaactattcctgttaaaccctctctcccatggacgacaagcacctcgtagccgtcattgacttcggctcccaatacacccagctcattgtgcgccgcgtgcgcgaactgggctacatggccaaactgtacgcgctggaagacctggaccagattcacgaacccggcgccgtcatcctttccggaggccccaaaagcaccacggacgcagacgctccggacattgactttgaatggctcaagagcctgaacgtccccgtcctgggcgtgtgctacggcatgcagctgctgaacatcaagcacggcggttccgtgaaggccagcaacaagcgggaatacggccccgccgccctgcttccggaagcctgcacaggcctgtaccgggacatgtccccctcctcccaggtatggatgagccattcggatacggtggaccacctggcggaaggctgccaggtgatcgcccgcaacgcggaaggcgtccccgtctccctccagtggggagaagcaactttcggcatccagttccatccggaagtgacccattcccatgaagggcgcaccatcctgcgcaacttcctctcctgcgccgccaacctcaagaaattcgatatcggcgacttcaagaggcagctcatccgggaaatccgggaacgcgtgggcagcaagcaggtggtctgcggcgtctccggcggcgtggacagcaccgtgctggccgtcctgctgcatgaggcaggcgtgaacatgcgcgccattttcgtggacaacggtctgcttcgcaagaatgaggccgatgaggtacgcgccaatttcgcccgcatgaacgtggaaattgaaacggtggacgcttccgaacgcttcctgacggccctggccggggaaggcgacccggaaaagaagcgccgcatcatcggcggcctgttcatcgacgtattctgggacgctgtgggagacgcggaaatgctcgcccagggcaccctttatccggacgtgattgaaagcgcctccaacgccaagtccaaggcctccgtcatcaagacacaccacaaccgcgtggagcgcgtgctggaactccaggcgcaggggaaggtgctggaacccctggcggaattgttcaaggacgaggtgcgcgaactgggcgcctccatgggcatccctcacgacatcctgtggcgccaccccttccccggccccggcctggccgtgcgctgccccggcgtagtcaccagggaccgcctggacatcatccgggagtgtgacgccatcttcatcggcaacctgaagaaatacggctggtatgaaaaggtctggcaggcctacgccggcctcatcccggtgaaaacggtgggcgtgaagggagatgaacgttcctatgaatgggccaccaacctgcgcgccatcgtgtcggaagacgccatgacggcggactgggtagaactgcctccggccctgctgcgtgaaaccagcaaccgcatcctcaatgaagtgaagggcatcaaccgcgtcctttacgatatttccaccaagcccccggcctccattgagtgggagtaatactataccgcccctaaaagggaggctgtaaagtcccatgaatacaggtctttcgatctctattgcatggcgagaggataaacccagcgaggttaaagtttagtttatccttaaccttttgtttgccacaaagcgcaggcaccgttccttgccaatggcaaggggcggtgcaccgctgctccctgctggtaatttgcagaatagcatcgtatatcacttcctgcgatggaggagtaaaaaaggtatttataataacaagaaggcaatattgcatgattgaaattgaatctaacaagcaggcttggggtaaaatatcagaagagcattatcatcactttaaagctttactaagtgatgataatcttcacttgaactattatatacaggaagaactgggtgacatatcaggcaaggaaataatccatttacagtgtaataccggtgcagatacattgatacttgccaaaacagctaaaagcgtggtcggggtagatttagttcctgacaacatattttttgcaaataaacttgccggcgatcttaattttaaaaacgtaaaattcattgaagccgacatcatgactttatcaaaagttcatggtgaaaaatacgatattgtctttacctcggagggagtattgggatggcttcccgatttgaatgtatgggcgaataccattcgcagtcttttaaaggataacggctatttgtatgtatttgattcacacccattttttctttcctttgatgagagcaaactggacaaggaagttttcgagattaaatatccctatttcagtaaaattccctctgtggatagttccatcggcggatacgcctgtgaaccgaaagatggcgtaaaatcctatttctggatgcatacggtttcggatattattaattcattgacgagggccggtctgcacattgaatattttaatgaacatgctgaaaacttttatgattctggaaatatgcaggcttcttcttcaaagaaagggctatatgcgtatagctgcaacagggacaagtatcccatgtcatttagcttgaaagcatctgcataccctgcaaaatgagcattcattcacgatcgctcggcagaatggctgccacagtccataatcaacaacaaagggaaaaagacaatgactgaactggaaaaatgcatggcgggcgaatggtatgactgccatgacccggtatttctggaattcaagagcaagacccaccggctcctgatgaagtacaattccctgccttacgaccataaggaggaaaagcgccaggtgttgaaggaaatgctgggcagcatcggcgccaaagtatccatcggtcattccttcacctgcgactacgggcgcaacatccacatcgggaacaacgtcaccgtcaatacgggctgcacgttcgtggactgcaacaggatcaccatcggcagcaatgtgctcatcgctcccaatgtgcagatttacaccgctacgcaccccattgagctgaatgagcgcctcactcccgtggaaacggcggagggcatggaatacattcgccataccttcgcccttccggtgacgatagaagacggctgctggattggcggcggcgtcatcatcctgccgggaatcacgatcggaaaaggcagcgtcatcggcgccggaagcgtggtcaccaaaaacattccccccgacagcctggcggcgggaaacccctgcagggttatccgtaaaatcaacgggaatcgcgaacaatgattaaactgatcgcttttgacctggacgggacgataggggagacggtccccatgtgcatccgggcgtttgaaaaagcagtttccccctacgcgggccgtacactgagcgaacgggaaattacgcagaccttcggcctgaatgaagtaggaatgattaaaatggtcgccggggaaaaatggcaggaagcccttcatgatttttacccggtttatgaaaagatgcatgaggaatgcccggaaccgtatgaaggcattcgcgaattgatcaacaccttgaaaaaggagggaatattgattgccctgattaccggaaaaggagaaaagagctgccgcattacgcttgaacaattcggcatgcaggatctgttctgctctgtcaagaccggcgcggaagacaggccgaacaaggcggaagccattggggaactgctgcatgactgccacctggcaaaggatgaattttattacgtcggggatgcggtatcggatgtaaccgcctgcaggaaagcgggcgtgacctgcctgtccgccgcctggggaactaccgcggacatccgcggcctggaagaagccaacccttcaaaagtatttttcagcatcagggacctgtcgcatttcctgctccggacgcgggaaaacacataacctgttccgtttttttatttgccttaatcaatcgcgccctgcaatcctgccgccatggacaccggttccatcatcctcacttccttcctctccaccattcccgtttatcttttcttcgccacgggtttctatctgcgccacaagcaggtcatccaggcggaccatgacgcgcccatcatgcgcatcgcgatggatgtggcctatccctgcctcgtcttccacagcatcatgaagtacatggtgctctccgggaatgaaacgctcagcagcgtttccttttccctccaggctattgcagccggagcgctggaacttctgctgggcatcgcgtccgcatggctggtcgccaaaatgctgcgcatgcgcatcggcacgggcctgcgcaccttcaccctgacggcgggggtgcagaactacgcctttttcgtcattcccattatccagatgctgttcacggccagcaatgaccccacgctgggcgtccttttcgtccacaacgtggggtgtgaactggtcgtatggagcatcggcgtcatcatcatcgcaggcggtccgggcaacctgaacatgggcgtcttcttccgcggccccctgctggcggtcatcgtgggcctggcactcgcctggtccggcctgggaacctatgtagcccagccgcctctcatgaaaacctttgaaatgatcggcaactgcgccacgcccctgtgcctgatcctgttcggctgttccatgagagacctgtggcacaacatgaagtgggagcccaaacccatcatctgcggtctgctgacgcgcctgggactggctccggcgctgctgctcctgatggcctatttcctgccggtggacgactatatcaagcgcgtcatcatcatccaggcggcgattccctccgccgtcatcccggtcattctggccaaacgcttcggcggccatcccgacctgggcacccaaatcctgctgaccactaccgtggcttccttccttacgctgccctgctggctggctctgggttcctcactggtcgtaccgttgtattaaaggcggcgcggcagcgtcatcgcccggctgggacacgggccagctccgtgcttccggaacctttcccgttcatggatgcggttcccttgttggatactccatcagcagaaccattccagtcctggaacgcctttattctttctgggccccaccacatttccatgctgaagctttcccacctttgtgttgactcccccggcggatgtgtattgaatgggctccatgaagtttcctgctcccctttgcactgccgccgtactgccggtcctgttttcctgtgcggagcaagtttcccggattgaacatgtgcgggaggttcccttgaaaaccacggtggttcctgcagaagatgtaggcatgcaccgctcccaggctacttacctgctgcacggcgccgtctcccagcaacaacgcctccagcgtctgggccaatactacttcgtcacctggaatgatgcgaacccggaacaggcggccaccctggtcatgatgtaccgacagggaaaaacaggttcagccgtcctgacaaaatccatttcctaccctgccgggagaaagggaggcacgcaaaattccgtttttgaattcatcggggatgaagccaaaacaaaaggggagattctcgcatggaagctcgtcctgaaggacaaccacggcaaaacaatctccgaacgccattcctacctgtggggagacgaccattgaccctccggcaaaaacgccgaagggccaatgaaaagtaaccggatataaaggattggaactacggcttccgggtacaatcacccaaggcgtaccccctggtccttaatccctaggaatgtcttccgccaacaccggaagacttacgcttcctgccgtttggcacggcgcttgcggacggcggcggcaaggttttccagcacttccaccgtactgtcccagccgatgcactggtccgtgatgctcttgccgtacaccaggtcggagctcagcggctgggccccttccacgatgttgctctcaatcatcacagccaccacctggtcggaaccgtcggaaatctgttccgcgatgctggcggccaccgccggctgtttgcggtaatccttgcagctgttgccgtgggagcagtccaccataatgcggttgttgatgccggccttctgcaaggcttccgctgcttccttcacatgttcgtcatcgaaattcgggcccagggaggaaccgcgcagaatcaggtggcaggatttgttgcccgtggtggaaacgatggcggaaacgccctgcttggtcacggaaaggaagcagtgcgggcaggaggaggaaatgatggcgtccacggcaatctggagactgccgctggtgccgttcttgaatcccacgggcatggaaagcccggaggccagttcacggtgcacctggctttccgtggtgcgcgcgccaatggctccccacgtaatcaggtccgcgatatattgcggggtgatggtgtccaggaactccgtggcggcgggaatccccatgtcacccaggcgcagcaacagcccgcgggccatgtggaggccgcggttgatgtcaaaggtatggttcatgaacgggtcattgatgaggcccttccagcccaccgtggtgcggggtttttcaaaatacacgcgcatgatgatcaccagatccttttcaaagcgcgccatctgctccttcaggcgggaggcatagtccactgcggcctggggatcatggatggagcacggccccaccaccaccagcaggcggtcgtcgtggccggaaatgatgttctccgcattcttgcgggtcgtagccaccattttggcgatttccgtggtcgccggataatccttgatcaggatggcgggggaaatcaggggctcgatgtcttgaatgcgtacgtcgtctgttttgaaccagttcatgtctgggacttattgaggggtttttgagagtggttgaaaagaaaaaaatacggtttggaggcaatatgcctgaatatatcgcggggcctcgcggccataagccggaagccccgcaaaataaatcggtcccgcctctcaacaggcggttccggaatgcgttaccaggaagtcacgttgtcttccgtcatttccggattgttgatgtggccatcctccgtgctgccctgcttgtccttgccgacgctgtaaacggccacgttcttggtcaccatgcgggaaccgacctggacgcggggggtgcggtcgtcgggattggcattcaaaatgatgtggtagggggattcccacgggtccatcaggcccacgcggccacggctttcaaagaacaggccgggagaaccttccacatccgtggtcgtggtgttgaaataggccgttttcttgggattcagcttcctgtcttcatccccgcggtccatgtagttggtcaggatgctcatgatgcggctgtcgtcgtccacggcggtcgtcatgtaatactgtccgtccttgcgggcctgcttggccatttcccgtccgctccaggctacgggaacgcggccgttgtccagcatgtagttctcaacggctgtctgcaaaccgttgcaatcgctccgcgccgtggtaacccgtgatttttccatcacgccgttcaccaccgtcatggcaatgccggccagcgtcaggataatggcgatcaccacaagcaattcaatcaacgtgaatcccttggatttacggttcaaaaaaggtgccttcatactttgccaagagtagcgcaattacggttcagggcaagcggaaaacaaccggaaccgccaatttcaaagcgcgtttccggagcggcaaacatgcggcgcatggccccggcatgcaaacgccccggctgtcggaggacggccggggcgtttaaaaagaacattcttttaattagcgggagcgggagcttccggagagacaggagcgggagcttccggcacagcgggagccggagcctgtgaagaagcggcttccgcctcagcggcgcgcctgcgcagctcctcctgctggagttcttccggcgtcttggcgggaacggaggcttcctgcttggcggcggccttcatcatttccgggctcagcaggctttccgagctcttgacgtgctggcggttgatcagcatgcccagcaccaggcaaagaatcatgaaggcggagccgaagtacaccgtagcttttttcagcacatccgtagtccgcgcgccgaaggcctggtccgtgatggcggcgccgaaagcggctcccagcccttcctgcttgggtctctgcataagcaccacgcccaggaggagaagtgacacaatcaccagaacggcaaagagtaactgaatgctgatattaagtgaatttgctaaaaaaaggttcatgaacgcggggagtatgtgtgaattcagatggtttgtaaagtctaggaaatgatttcgttatgctcgttgcaaacgattttcttgggaacgatgggcttgtccgacagggcaaagctcatgataaccacccgttcgcccgtcttgatcaaatgggccgcgccgccgttcatgatgatgttccccgtaccggcaggcccctgcagggcatacgtttccagacggtttccggacgtgacggacgccacgaggaccttttctccgggccacaggtccacagcggccatcaaatcggcaggaatttcaatactgccttcatattgaacatcgccacgggtaatcatggcgcgatggatttttgattttaactgctcaaccaacatgacgtccgaacaacaaacccccgatcgctctttcggtcaagccgtcatcctccattttacggttttctgtgtcttacttatcccgtctcaacacctcagcggcctgggcggcgtccagcgcaagctggcttttcagttcttccagggaggggaatttggtttccgccctcaggaaccggaccggcaccacttccatttcctgcccgtaaatgtcccccggctggccgaacaaatgcgtttccagcaacagttcccccccctccccttccaccgtgggacgcacccccaggttggcgacgcccccatattccgcgccgttcacccgggcgcgtacggcgtaaacgccatgaggaggctgcaacccgcagccgggcttcatattggccgtggggtagtccagcaggcgtcccaattggcgtccatgaatcaccgggcccctccagcggtagggacggcccagcatgccggccgcctgtaaaaaatccgccgcacgcacggcttcgcgaatccgggtgctgctcacgcgctccccgtcccgcaggatgggcggaacggccgtcacccggaacccgtagcggccggacaaaaggcgcagggtttccacatcgcccgcgcggcctcggccaaagtgccagtcttcccccacggcaatctccgccacgcggcaggaggcgcagagctccctgatgaattcctccgggctcatggaagccagccgggaggaaaattccagcgtcagcaccatcttcacccccagctcttccatcagggcgaacttttccgcatccaccgccataatggcaggcggcacgctttccgggcggacacgggccagcggatgagtgcggaacgtcagcacggcggcaatgcctccgtcacgggccgcgccttccaccgctgcggcaatcactccggcatgccccaggtgcagcccgtcaaacatccccatggcccagtgcacgggggaagaaacacccttcagttccttaaactcccggtaaatgaccatgctgctacctggcaatcagaatgtccgccagctcctccagggaaagcatggcccggaacagctcttccctgggggcggttttcagggtatccaccgtaacggcgcgctccagcgtaaaagaaccggacctgatgcgccggagggcgctcaaatgcgctccgcagcccagcgccttcccgatgtcatacgcataggaacgcacgtaaaaacccttggagcattgaacggtaaagtccacttccggaacggccacgcgggaaatttgatggccgaacacctccacgggccgcggctcccgcacaacttcctgccccttgcgggccagcttgtacagcgggacgccgtcctttttaatggcggaaaccatcgggggaatctgctcaaaagcgccgtcaaaccggtcaaacgcctcgcgcacggcctgttccgtcacgccgtccacggaatactccgccaccacttcccccatggcgtcctgggaagaggtctccactcccagcgtcagggttccggcgtattccttgtgttcgcacatcagcttgtcctgaagcttggtcgcctttcccaccaccagcatcagcagccccgtagccatggggtccagcgtgccgcagtggccgatcttcttaatccccagggagcggcgcgcaatcgccaccacgtcgtgggaggtcatgtcctgcgccttgtcaatcaacaggacgcccgagggagcttgcatggaatctgaagcgttcatgaaatctgctgttggagcacgcgttccacttcctcctgcatggccttcaggatggtgaggcgcacttcttcaatgggtcccctgatgcgcactccggcggccatggcatgtccgccgcctccaaaacgggaggcaagctccgccacggatatttcaggggtcttggacctcagggaaatgcggatacggggatcgtcctccgcctcctccagataagcggccagccagactccctgcacggaacgcaaaaggtcgatcaggccttccgtgtcctccggacggctgccgatccgtgccttcgcctcattcgtcaggcagaacgtgcaaatcctgccgtccggcgtcagcctcatgccgttcagagcctcgcgcatcagctgcatcttcacccagggcttttcctggtaaagctggcggttgatgtcctggacgtcaacgcccatccggatcaaatccgcggccagctccatcacggccgccgtcgtcatctggtactggaaggaacccgtatccgtgctgacggccacgtatagggcgtcacgcattatcggggtaacgggaacgcccagatacttgaaaaaataatacagcaccgcacccgtggcgcactcgtccggcagaacgcattgcacgtccccgaacaattcattagtctggtggtggtcgatgttcgcccacaccttcactcccgccagggccttcagactgcgttcgcccagcctcttgaacgcgccgttgtccacggaaacggccacttccacgtccaccggctcatcgggcgtggggatgatattttccacgcccggcataaaggccagattggaaggcacgccgtcctcgttcatcatcaccaccttcttgcccatctgcttcagggcttcccccagcgccagcgtggaaccgatggcgtcaccgtccggatgcacgtgcgcaattaccgcaaagctgtcatgtctgcggaacaggtccgccaaaggcgcaaattcgggacaatgtttccaatcttccatatgttctgccgcatttttatagaaaaagccgcacttggacaatcaccaagtgcggcttgaaaagtcgtacctaatcccggaagaggattacttcttggacttcatgaccaccggagccacatccacggcgggctggttcaggtcattgaacttgggaaggggggtcagggggggagcaccctgatcctgacagcagcaggaagccatgatgctcgccgcaaaagcggcaagagccataacggtaatcttcttcatatgcgtggttaaatgatgggtgataaaggatatggaaatatcttggagcataaaagcataccatgcgggcgcccgtcaatcaaatttgctaaaatctcccaagggggcgcctttccgcctgcttctccccgcaatcgggcctttctcaaatggcaagacgcataaatcgctcgcctgcggtcctcaggaattatagtctctgccaagccgcttcccttccatgcccttctccgtcagaatactccggcttttcggcaccctgctgctgggcgtctgcgcgctcggcgtagccggcattacctgggcgtacctgatagaacccaatcttctgttcgtccggaaggtggactaccgcgtcccccagtggaacggccgcggaaaacccgttaaagtcgtcattgccggagaccttcacctgatgcccacggcctttgatgaagtgagggcgctgcgctacgtccggagaatcatgcagcttcagccggacttgatcctgctggtaggggattatgcccgcggcgccagcagaaacgccagcatgagccccgccgcggccgcccggctgctgcgggggctggcagcgccctgcggcgtcttcgccatccaggggaaccatgacttcaccttcggctgggacaactggcgcaaggaactgacccgggccggcatcacggtgctggaagaccaaagcgcgcttgtcacgttcaaggacggcaggcagctccagctatccggaatgctggacacctcgcgcaattccaaaaaacggctccccaagcgccagtccccggatataccccatttcctgctttcccaccgtccggaagcggatcacatgctttcccatggggacgcggacatcgtcatcagcggccatacccacggcggccagatacgccttcccttcaatctcctgtggtttgaagccagcccggaacacgcccagccctacacctacccctggcatatttccggcggcaacacctatctgattaccaaggggctgggaaccagcacgctccccctccgcttcaactgccctccggagatctatctgctggaactgcactgacgccggcagcccttttcatgccggactagacggcggcgggaaaaggatttttctttgtttcttgatttttcgcggccatggaccagcatggagaatggttccgctgttttccatgatgactacttccaccaataccaaatccaccctcagaaagaacgccgtcctgtttggcaacggtttgatccgcacactgggaagcccaagcagcattgacctgctcaaggaaaccgtctgccctccctgcaacggcggtgaaggctgcaagcaagacatctattgcccgttcagagaccagggggactatctgccttttcccctgatttacgagtatttgatcctgaaaaaacaaaaacggcatccggaagccgacatgggcaaagtatcctccgatgtgcgtgaccggctcaagaagaaactggaagagttcaccccgcagaaatatcccggctccgttttacaccagcttgccgcccttccaatagacgactatctgaccaccaattacgacacgttcctggtgcagatcctggaatcacagcattacaagacaagccagcgccggaattcggaaaccaaatacagcatccgccgccatgtctgcatggagaaggaacgccgctccctccgcatctggaacattcacggcacctataatgaaaaaccctcctccttcacgattcaatacgggtatgagcactattgcggctgcatcggtaaaattgacagctatttaaagggaacctacacttactgggtccaaaaacagaaaaaagaaatagcgggcatcccggaaaagctgcgcaagccgcagcttcaactggaggaatcatggattgacctgtttttcttttccaacgtttacatcatggggctgaatctttcttcggaagaaatagacctgctgtacatcctgaacctccggtcacgatggctgcgcgattcaaaaaaggcgcgctgcatccaaaaccgcatcgttttctacggccagcccgccaaagccatgaaagcccttctggaagaatttgatgtggaggtttgctcttcttcgcccacgcctcccggaaaaaacgcgaaaggtacggattacgagaagtattaccgggcggttttacgtgatatccagtacagaataaaacaggcacattaacccgcatccggcttcaggagcatgtgccatcctccttctcaaactgcttttgcagcctgagaattttattcctggtcatccggtaaacaggccggtaaaggtgctttttcaggatggccgggagggttcttccgggcagcgggccatgcagcagcccggcttcacgcatggcgcgttcgtaacgttccccttcatagcgccaattataccgccagggcttgtgcaccccctggtaatgcagaatgcccggttccagcgccgcttccaccgcctggcgcggcgtcactcctcgccagaaccgttccctggggtcgttcttcaggatgcggcgcgtcaggccgtcatgccagttccagcgcggatgcagcggcacggtcagctcgcacagggcgccgttcagcgcgtcctggtccggacaggtcagcctgtcccggtgactgacggcataatccagcacggccctgaccaggttcttttcccggaaaacgtccacattcatcagcagcacgccggaattgaaataccccgtgcaggtcagcggcatctccaggcgctcgttgaaatgggagccgggcctggaaaaattctcaaacaccactcccaccgcgttgccggacatatccgtccggaacagctccgtcaaatcccggcaaaccagaacgtcaatgtccagatacaggatgttgccccgctcctccttcaataactccgggatgaacacgcggccccaggcgggcacgggccactgttccgtatggggaaagtcgtgcttttccagaatgccggaaacgtctatgaactccaaccggcactcaaacggggccgccaggcgctcaacgctgttccggttctccccgtcaatgccgtcggaaaggatgtaaatcttgtaaaaggtttccggagcagcggtgctcagcagggaaaagacggtaacgctcaaaggcaggatgccccggttgtcactggccaggacgacggcaaattcattcttcttcatcggtcgatcgttcgggtggtgtcagcggcgcagcagccgggcgcccgctttgcgcattctcttccagtaataggaaaagtccaagccggattttccggccagccaggttttcagcagtttttcttcccggcgggacaggcgggaatcctcctctccgggacggtacaggttttcttcacggagcattcgggacactttccgggtgacctctttctggacggcatggggggcgtacttgcggatattccgcacgcccatcaccagcattttcagaaaagccgccctgtattcctccaggattccggctcgtttccactcttccagcaccagttgcgccaccgtcaggtaatccagcgactgaagggaactgccggacgcaaagccgctggtgatggacccggcgcgcttgcggtaaacgtacgccgccctgctgaccacacaggcccttctgcaccgcggaaaggcggcatagtggaaatacaggtcctcgcaggcaacgccctcggggaaccggatgccgtgctcctccacaacggaacgccgtatcatcatgccgcccgctccatggtgtattttaccgatggtttccggcgtacagggaatccatccctttccggggggcgcgatgtcctccggcaggaaccggtcctcccttccggggtcggactcataataataccggaacccgcacaccagcttgtcggcgtccagcgccttcgcacggctgtacatctcctccagcaaatccgtttccagccagtcgtctgaatccaccagcaccaggtattctccctgcgcatggctcatcgccaggttccgggtgcgggaaaggccgccgttttccggggcctgcaccactttcacccgctggtcccgctccgcaaactcccgcaggatggacagggacccgtccgtggaagcgtcgtccacgcaaaccacttccagctcccggagcgtctgtgcgcagatgctttccaggcactgggccagatacggttccacattgtaaaccggaaccagcacggaaatgttcacgggagccatcatgacgcctgcggagtggccgccatttttgcaggttcaagctcttcctgcgggggcaggaagggctccagcgtggaccacgcctggtccaccgtaatttcctcaatggagccgggggaaatcaggttggaaatgcaccgggccgtaatggcggacttgcgcgtccggtggcagaaaatagcggtcaccgggaccccggcataggcgcacatgtgcgtaggcccagtatcattgcccacacaggccagagaacggagcgccatctggggaatatccatcagggtggacttgcccagaaaactgacggccaggggggagctggcggcaatggcctccacctccgcggcctccgcccgggtgccgatcacgacggaggaaatgcccctttccgccaagcgccgggccagggcgcagaaattctccacgggccagcgcttgtagggatggctgggggaacagcccggaatcatcatcacgtagcgttccggaagctcgtcaaaatgcagcccttccccgtgcatgaaagagaggtccgtcaggacgcgttccaggtggaacggttccttcaccaccctgccaaaccggaagccgccttttttcagcagcctgcgccgttccccggaattgcaggccacccagtccatgtcatggtccagcaggaagcgcacggcgggataataacgcttcctggtgcgggaagattcctggaggtcgtacaccacgtcaaaattccctttcacgatggaacggatggccccccacgtggcgcccagcttccggtagggcaggcggttgtccacaatgaaatcgtcaaacaccccgagctgttccgccatgggaacaaacatccccatggtcatcagggtgatatgcgcctccggatggagctcccggagccgcttcatcgtccccatggcaagcaccacgtcgccaagggcgccgtgcttgatcatcagaatgcgctgtgcgggcatgggcggaaaaaggaatgcgggttaaacgtagctgtcctccctgtccagatacttctgcacgtactggcgcacgccgtcctccagggaagtcatgggagctgcatagccggcggcgcgcagcctggaaaggtccgcctgcgtataatactggtacttgcccttgagttcttcaggcatctcccggtaggcgatcttttcctggagccccagcgcattgaacgccgccttcgccagatcgtagaaggagcgcgcctccccggaccccacattgaacaatccgctcacctccggatggtccagcagccagagcaccacgttcacgcagtcacccacccacacgaagtcccggagctgccagccgtcccggtagtcgggatggtaggacttgaacagcttcaccgtttcattcaccttcacctgggggaaaatgtgggccaccacgctcttctgcccccccttgtggtattcattggggccgtacacgttgaaaaacttgagcccggcgtactggggaggaaccggccgcccttccttcacctcccgggccaccttgcggtcaaacagggccttgctccagccatacgcgttcagggggcgcagggcattgacgtgctccagggaggagtcatcgtcaaaccccatggagccgtccccgtacgtggccgcagaagaggcgtaaataaactgcttgccgtacagggcgcagaactcccacaggcgccagctcagcgtgaaattcgtccggatgatcagatcagcgtccgtctccgtggtggcggaaatggcccccatgtgaatgacggcctcaatctcctccgcatgcgcctccatgtagtcaagcatgtcctccggaggaatcacggcgcacagctctctcttggcgatgtttttccacttgtcggaagagcccagctcatccaccaccacaagatcctttttaccggccttttccagagcggcgacaatgtttgagccgatgaagccggccccacccgtgacaataatcataagagaagaataaatgaagaagttgtacggccttttgtaccacatccacccggccctaggcaactgccatttgaggcgttcccgaactccaaattctcaacgaatttacaatccggatactccaacccctggccggtccacgcggaaaaccgttggaacgcaatccctgcgcatcccgcggaatccccggccttcatcccctcttttcatgctgacaacgttaaaaaccttcggtaatatttatcttgcaaaaattatcattgaccacggattgtaaatccgttacatacattataagcttatgcgtcccgacgtttccatcatcgttccctgctacaatgtagccgcttatgtggacgactgtctggacagcctggttcggcagaccctccggaacattgaaatcatctgcatcaatgacggctccatggacgatacctgggcgcacctgctccgctggaaggaaaaggacggcagaatcatcctcctgaaccagcagaacgcgggcgtttccgccgcaaggaacgcggggctggatgcggcgcggggcctttacgtcggctttgcggacccggacgactacgtggacccggaaatgtactcccgccttttttccgcggccctggaacatgatgcggacatcgtggagtgcggcaaccatgtcttcgaggactcgtcggaccggctcattgaggccagaaggaggtcgccctcctggcattttgaaaaggacgcctccccggccagcttcttccgggactccatctggggtaaaatggacatctgcgtatggagcaagctgttccggaaaagcatgctggacgcccaccgcctccgcttcaatgtgaacctgaaatccggcgcggaggatgaaaccttccggctgatggccgtcccccacgcctcccgcctcctgttcattccggactgcctgtattactaccgcctcatgcggagcggttccctttcccgccgctgcaatgaccccacctacttcaaatgcgtgcaggaattccagcgtctgctgtacatcgtggactactggaaggaacacggatggcagaatgaaggcctgttcgcctatggcgtgcggaaaatcaggcctttcttcgtttccaagcatcctcttttccaccagatgaccgccgttcagcaacagtccctgctggactggtggcacctgttctaccggaacgcggaaggggctcggttcctctccgtcctgccgggccgggacaggcaattggtggacctgctgaactcggcgcagccgccatccaacggctggggccgcatcctgctggcggcctgttccctgcttcccggacagaagggacgctattactcctgcaaaagaatgctcgcggaacatttttcccaagcgcattccaacggtttccaagggaaaaacgcctcgccggaagagccgtttgacacatcgccgccttccctgtaaattgccttatccctaccttccggaccaatgaaccgctttctctcattcgcagactcccgcatggcggccgccctggaacggctgggcaggcaggcggaagcgctggaatttttcgatgagatcacgctgttcacggaacatgacctttccgcggaattcaccggccgcatgggcaaatacctgacgccgtcctgccggggattcgggtactggtcctggaaaccctgggccatccaccacgtcctgcaggacatgcaggaaggcgaccgcctcctgtacctggatgcaggctgccatatcaacattaacggagcgaagcgtttccgggaatatgtggacatgctggaccgggacagccgcggcatgctggttttcaccaacgggcagccggaatacaaatggaccaagggggacatcctgcgccacttcggcgtttccggggaagatgtccatgtcacgcacacccagcaaattgcagggggccacgtctttctgaaaaagaacccggtcacggaaagcctgatccgggactggctccatgtcttttacgaccatctgcacctggcggacaattctccctccgcctctcccaacctgccgggctttgtggaaaaccggtatgaccagagcatcttctccatcctgtgcaagctgcagggcatcaccgccctggacggtacggaaacctatgcggaggactgggaacagctttcctcctttccattccaggacaggcgcgacatgggaatcccgcggaccgcaaaaaaaggctggctgcaaaaatgcaggcagcttcttcttcccgccaaaaagggcggattaggaatccggtaaggatgccacagctcggaaaagctctccttttcccccctccgggatggtccaattgccgctccatcaacattctccccatctccctttcatggtcgcgtacctcccgggagccacggcctcccggccctgatacctatcgcctccggaacgcagcaacggctatttaatattatttatactattatatacaatgagttatatctattatagccagaaatcttccgctcccaggcgccgaagccgcaaaacaccgtcaatcaaaatatcctttcacagccgcggcccctccgtgagccagcttcccctgcttcttgttgaaagaagaagcctccctgacatcagggccagcgtctgccggttcacggaataacggcaagcgaaatcttcccaaaacgtttttctttcagatttgcaggcttgacgccggattcctaatcctcatactcccctatgtgacttctcctcaacgcaggacagtattccaagtctcccacagcgtatcggccagctccgctccctaccggttgaatgatgccctgaaccggaatatttccgatatggaatccgtccttctgctcaggaggcgcaagggaatagacggcctggaaatcagcagatccgccgccagaagagctacggacgcgctgcgccgccatctggcgcatggatttgacgccctgctgccggaaaaaaggagggacctgcccttctccctgaacgtgctgggcatggggttcgacaccgcccagatggagaaagccgacctggtgcacctgcactggataggcggccgaacggtggatttcacgcggctgagccacatccgccgcccgctggtctatacgctgcacgacatgtttgcctgcaccgcggggtgccactgcaccatggactgcgaccgattccgggacgaatgccgcggcagttgcccccagctcggcactccccgcctcttccgcggccttccggcgtggctgttctcccgcaagcgccgctccttcgcccgcataccgtccctgacgctggtgacgccctccctctggctgaaaagggaagtggaaaaaggctgcatgttccccggaagaaggattgtccagatttacaaccccgtggatacggacctcttccgcccggcggaagaccgggaggccatccgtgcggccctgggcatcccgtccggagcctttgtcattgcctgcggcgcaaccggcctgttcaatccggtcaagggaggccatttcatccccctggtgctggaggaactgtaccggcgcgggcacaggaaccttcatctgctgctcttcggcaaccaggaaaagaacgtggaattccccttccccagcacaaatgccggcttcattacggacatgaacaagctggccgggctttacagcgcagcggacatcttcctgaatcccacgcttcaggacgtcctttccaacgtagctctggaatccatggcctgcaagaccccctccgtcaccttccggacgggcggagttccggaagtggtcctggacggcaggacggggctggtggctccccagggagacctgaatcaaatggcaggccactgcgaacggctcatccgggacggaaagctcctgctggccctggcggaggaaggccgccaacacgccgaacaaacgttttcctaccccgtcattgccgcgcggcacgccgccctgtatgaagaaacgctccgggaataccgtcgcgaagggtgaaaaaggctgatgtttaaccgccgggcaaccttcccccaacacgcccggccggcccctgcctttgtcattgacaagaaagagccgccccatacactctcaaccactccgacccgccttctcccatgaaaacgcttaaaatctcctttttacagtccactccggatttcggcagggaaggcatttaccagctcctgaaagaccgttaccgcgtggtggaagacgattccgacttcgactacctgatcgccaccccctggttttacgtcaaccgggaagcgttttacgattttctggaacgggcccccggccatatcaccgtcatgtacggctgccatgaagccatcgccccggacttcatgctgtttgactactacatcgggctggatgcggtgcccggaagcgaccgcaccgtcaaactccccttcctgcgccaccatttgcaggaagtgcacggcggcaaggcaggcctggacgtccgcgccctcctggcctccaaaacgggcttctgcaacttcatttacgccaaccgcaaatcccatcccaaccgggacgccatttttcacaagctctcctccgtccggttcgtcaactccctggggccccacctcaacaacacgccgggcgacggccaccggtcggaagactggtacgcctcctccatccggatgaaaaagccgtacaaattctccattgcctttgaaaacgcttggtaccccggctacaccagcgagaaaatcgtcaccagcatgcttgcgggcaccatccccatttactggggcaatccggacatcggaagggaattcaactccgccgcgttcatcaactgccacgacttccccaccttggacgacgccgcggcctacgtgaagaaagtggacgaagacgacggcctgtggtgtgaaatcatgtcccgcccctggaaaaccccggaacaggaagccctcttcctggaagaaacggaacgtgaaacagccaaactctaccggatattcgaccagtctccggaagaagcgcgccgcaagggggacggcacatggattgcctactaccagcgctttttaaaacgcggccacaggctgcgcctggcatggcggcggctgaagaaccgcctgcgccactgatccaggctcccggacagttcaactccatcccggcttctctcgcttcctcttcactttctcccccatccctgtattttcctcctttccgcctcatgaacaaatgcctttctgaaaacttttgttcaccttccctccatcaggccggaaatgccgcccacggaacctactttccgcacatcgacggcctgcgcacctttgccgtgctggccgtcgtcctgtaccatttgcaggaatggatctgcccgggagggtacacgggcgtggacatcttcttcgtcatctccggctacctgatcggcagcggccttgtccgcagcctgaaggaagggaacttctccctgtcctccttttactaccggagaatcaggcgcatcatgcccgcctatttctgcctgattgcggtcgtgctggccttcgggtgcgtggtgctggcctgcgacgacctgcggaccctggggcgcaccgtgaggtcaagcgccctcttcatcaccaacatttatttcagcaggaccgcaggaaactatttcagcccggccgcagaagaaaacccgctgctgaacctgtggtccctgagcgtggaggagcaattctacctgacgattccgctcgccctgtggctgctctggaaattcaggaaaaacgccgtcaagcccgttctctgcggagccctggcgctctccctgttcgccgccgtctaccacatggggaatctggagcataacaaggccttttacctgcttcactgccgcgcctgggaactcctggcaggctgtctcctggccctggctcccgtcgctgcggaacagggccggggaatacgctggctgcggctggcggggtgggccggcattctgctcccctttgcctgttattcctcctccacgccctttccgggttatacggccattccttccgtcgcgggggcggcccttctgatccgctacggaagccacggctggtccgggcgcatcctcaggcatccgctcagcacgggcatcggcaaaatctcctactccctgtacctgtggcactggcccgtcatcgtgtactggacctacttctgcttcaatgaatgcggtccgcgggactatgcgggcatgttccttctctcccttcttctcggtttcctttcctggaaattcgtggaaacccccttcaggacagccgccgcatggcggaagcccgcaaaagcgttcctgctcacggcggcagggtgcctcacgctggattttgccggagaatggctcaaatggacggacggcgcacgggactactggcacgtggccgccaacaacatatcattcccggaatactggaaggggccggccttcccgccctccttcggcatcacgccccctgaccgtgcggtggtggaaaagggaaacgccatccagccccatcatccggagctgggagacgtgacggactacccctttgtactgctgggtaaaaccgggcagcccccttccttcctgcttatgggagacagccatgccatggccagctctccgggctttgacgacgccgcccggctcctcaaccggtcaggcctgttctaccgggcgcggctatgccccctgagcggcatttccgagtccggagacgcggattccctcacgctgctgcgcatgatgtacccgcactgggagcacaacatggacctgattctggactggctggaaaacactccccagatacacaccgtattcatccacaaccgctggattgaactggtcaacagccaccgggacatgcgcctgaaacaactggttgcggacggcctgctccacacctgcgcacgccttcgcaaggccggcaagcaaatcgtgctgctgggtcccgtgcctgaatggaccttcggcccgcgcaaactcatgcggcgcaatgcgctgctgaacgccaaccgcgcggaccgcctgctgggcggagacttcatcacgcggcaacgccccgtattcgccctgctggagcacatggaatccacgggcctgtgccgctttatcccgctgcacggcgccttccataaaaacgggcggtggctggaagaagacgaggggcacctgatgtactgtgacgacaaccacctttccccctacggttccaggaaaatggtttccggcatcctcgaccagctttttccggggatggaaagcacggtgtccaactgacggaagctccgcacggaaaaacgcccaatcctttgacattgacaaggaaggaaggccccctacactgacgtcatgcagcgccgccgccgcgatgcttccggacgggttgcccgacgtacggcggaaagcccgcgcgccgcttcaacgcctccattcccatgacggattcctcccgccccatacgcatcaaggtcatcagaaaatccaccaaggcctccccggataaaacggaatccctgctgtggggcgactgcctgttctgcacggacgccgccatgacggactatgactgggtactagtatacgatgaattccccaggaactccataggcaccatcaaggatgaaacggaacccctgctctgtcccccggaccagaccatcctgatcacggtggaacccccttccattaaaatctacagccgggcatacaccggccagttcggcaccgtgctgactacccactccgtccgggacctcccgcaccccaaccataccctgggccgcggatgcctggaatggctgtacatcaagcccatgcaggagattctggaccagacggaatttccgaaaaccaagatgctttccaccatctgttccgccaagcagcacacgcataccatgcataaaatgcgttatgacctcacgcgctacctggcggaccgcctgccggagctggactggttcgggcatggcattcaggaaatagaaaacaaaaccgtcgccatggacggctacaagtaccatctgtgcgtggaaaaccatctggaaccccatcactggacggaaaaactgtccgacgccttcgtcgccatgacccttcccttttacgccggggacccgctggcgacggaatgcttcccgcaggaaagcttcatccccatccccctggacgatccgcaaaaagcctttgaaattatccgcaaggccatggacggcggggaatacgaaaagcggcttcccgccattcgcgaggctagacgcctggtgctggaaaagtacaacatgttcgcccagacagccgccgtcatccacaaccaccggggaacgggaaccgtccggcccggcgccacgctgaaagggcgccacgtcctgcggaaaaacccgctcaacgccctccgggagctggcggatacgctggcctataaaatcaggtcacgcggcaggcgcgggaccggagccggagtgtagcccggctgccgtccccaggataagggccaaaactcccccctaccagtaaatggaagtgctggacggcattttgccgatggccttgcggcaggcggaccgggccgcctccatgcggtggaaggattcggaaggaacgctttccccctggtattcagccagcttcctgcccgccagattatgcacggtcacggtaaccttcgtcctgtagccgggccgcgtattgggaccgggcagcgtggtgaaataattcccgttgcgaatcagcacatgctcctgcgccgtcttgctgacggtcgccacggctccgtagccgtcttctccggggtacatgacccggaaacccttggacgagagggaggcggcagccgtatccgccatctcccagtcggagcactggaccctgatcttgcggtatttgacccggcgttcggcggcggcccgctgattctgctccatctccttgttaaactgcgcccattcttccgccgtacatgcagccagggaggcaaacacggccgcagcggcccatctggtccaaattccgtatctcatcgctttaacaggcatacgttctcccttcagcctgaacccggttcaagccgtctgaaaaacagattgtcaacgaagccgtaaaaccttaatcggatttgcgggaggcgtgcttcctggcccgttcctcctccttctgcttcttcaggtcctccttcatcttggtcttctcctcggaatccagcttgccgtccttattggtatcatacttttcaaggagggcggccttcttttccgcggaagtcattctcttgggagcgtcttcctccgccatggagggcatggcgaacgcggcggccataataataagcaagtacttcatcattaaatgggggttcttaaacaatcctcttctactcccacgcgcttcccttgtctctctttttttagtaatgcatgtaaattacactgccatgcgccctttcctcctcgtgaacggctctccggcctaggctttcacgaacgggaaaaacagagggatcaccaccaccatgaccagccccatgatcacctggaggggaacccctaccttcacgtaatccatgaacgtgtacttgcccgccggcatgaccagggcattgggcggcgtggaaaagggagaggcaaaacacatgctggtgcccacggaaaccgccagcagcagcggataggggctgatgcccatgctcaccgcggattgcagggcgatgggagccagcagcaccgccgtggccgtattgctgatgaacatggtcagcagggaggccgtgaaataaacgcccgccatcagggcgaacggcccgaatccccccaggccggccaccaggccgtgggagatggcctccgaggtgccggtcttctccagcgccacggacatcggcagcatggcggcaatcagcacgatgctctcccagttgatcgtccggtacgcctcctccacgttgcgcaggcatccgcacagcaccatcaggacggcggcgatcagcaccgcggccaccgcgggcacccagttgaacaccatggccgcaatcatcagcagcatgatgccagcggccagcggagccttgtgcgtcagggtcaccttggacgcctccgccagcggctggcccaccacgacccattcaaaggttttctcactcaggcgcgcaatatccgcccaggttccctgaatcagcagcgtatccccgtactggagcttcacatccttcaaattgtggaaaatgtaatggttgtcccgctggatggccagaatgttgaccccgtacttggcgcggagcccggaagacttcacgggcatgttgatgaggtccgagttgcgcatgagcagcatctccgcaatgcctatctcgtcaaacttcaatttgctcttcagcagggaatccgtatcttccgacgtcttccggttaatcatcaccgccccgtattcccgggcgaaacggtccacgtcctcaaactcccccatcacgtaaatgacgtctccccgcgccacgcgggtgtccgagcccgccatggtctggctgaccgtttgcaggaaggaatgccggctggaatgcctgcggcgcacttccacgatgttcacgtggtagcggtccggtatctggaggtcgtgcagggggttctccgtcagggcggaatcctccagcacccggagacggtaaagattgctgatgatctggtactcgtctatcaactggctgagggacttgcccttggcctcgtgttccgtcttgtcgtcatgacggcccaggaacttcctgctcaggggaatcagcagcaggacgcccgtcacgatgcagatgaggccgatgggggtgaacgagaaaaagcccagcccctccattcccgcctcctgaagctggttgttgatgaccaggttggggggcgtgccgatcagcgtcagcatgccgcccatgctgctggcaaacgccatgggcataagcaggcggctcgtctggatgccgccgtccgcggccaggctcaccagaatgggcagcatcagcgccaccgttcccgtattgctgacaaacgctccgattccggccgtaacgagcatggtcagcaccagcaggcgcagctcgctcttgccggccagcttcatgatcctgccgcccagcatcttggccagtcccgtccggaaaatggctccccccaccacgaaaagccccaccatcatgactacgatggagttggaaaagccggaaagcgcctgctccgggcttaaaatcccgaacacgatcaggcacagcagggaacacagcgcgacaatatctgaacggattctcccctggacgaacaaaacggcggatactcccagaatgagcagcgtggtcaacatgtcaataaacggcagagatgaaaaatcggcaagagagaatatctaacatgtcctgcgcgccttgtcgataggctgaacaagtcatccgcctccccatcctccgcgcgcatgctcgtttcctgcttctcctacagggcggcgattcccttttcccgttgaacatcacgaacccgcaaccgcggaaacaataaaaaacgcgttcttccggagaacgcgttatgaaagtaaaagtggtggtagagaaccattccaaatattggtattcaataactttagttctatatgtacacttttatgtacacttgagcgtcatttttccataatctcgctatctgtgatggcctgtgatagcccatgaaacatatattcttatctttccgatgtccagaagatgaaaaacgcccccgcctatttggtcgggggcgacactccatgaggttgaagttccttcagaatattagtgcattgctactcttcggatgccctgaatattatattctacttgtctatttattcttttttgagtgcgttctaattcatcaattctcttgttggtcatgtcttgcgctctttgaatgtttgcatttatcgttgtagctaagttgctaaagttatttaccacagcagccatgaagcgatctgttgattccccttgcctgcggagggtctgcaacgcttcattgatggcggcgttgatctcggaagcatcaagcgtgttgtcgtctccgcctataccttccagaagccgctttttgccggcctcccatgcttcttgaacagcttccacccttttctgctgttggggcgttggatgctggggaatcccttcaaagggggcgttcttgatcagcttctcttgctgtttgactgcatcacgagttgcttctttcatggcggcatccctgactttctgtcgggcctcttcttttttccgggcatcctgtatagctttttcttcttcctgtcgttgagcgtttttctgctttgcttctgtattcctttgttgtgctgtatctctggcactttgggctgcattaagcgcacggcgttcggccaattcttttgtggcctgttcaagagtatcttccgctttgtattgtgcttctaaagcttttgtctgttcttccctggctttccttaaagcttcatcattggctttataggcattttccctggccgtttctgtagtaatatcataaccagcttcttttaaagcttgatcggaattatctctttgttttcttgccgcatacaatttttcccaatcagggaatgtaatttttccgctttctattttagaaatttctccctcaatttgtttcaattcatccaaagagagaataggcgtattttctaagactgccagacggtcttttatttgatttaatgattcaacggccttgctcaattcctttcccgcatttgtaacgctaccttgcgccgcttcctctgcttccgttcgatgtctggcatttgcatccattcttattccttcttgaacgcggtccagcttccgtcttgcttccgggctgttagggtctccgtattttccattataaaaatcagtttcaacatctagcaggcgggcgcggtcttgttcatcaagaatttttgattgcaagtcaatcaaacgcctttgttcccgtacggcttcccgtaaagcttcaacttcaattttcctattatcggcaattctggccgtaagatcattttctttttgtaaaatagattcattattcagtttcgcctttagctcatttgcttctttaatgagcttatccatatttttctttttttcctccgcttgcctttcaagttcatcacttttcgacttaaaatgattcaccaaggcagtaatgccggcggtaagcccctgaaacagcagcaaggcccagccaagcggccccatagccgccttgatggacgttccgaacagacgaatgaacggaattgccccacggagggaagaggacattcccaggatgcgggcggccgcttccgtcacttgcgcggataagccccggacctggcgccgggtaagttctccggcctttccggcagcggtgatacgtttttccaagtcctggatattcttcagggcgtccgcctgggctacgttgtcgccggccttccgggcttcttcaagcttggcaatatagatttccagttccgcccgcaattcctcataggacgcggcggcgcggcggttcccggcttccagccgttccacggttgccgctgcctgctgttgcttccgggcctccgcagcagccgctttttccgcggccttgtcggcggcgtccatttccttattgtagccgtcgaggatcttttgaaggttttcatcaaggttttcgccccacttcgcccccaggtccaaatctgacattttgttattgaggacttccgcgacgtcatcaatctgttcaaatttcttcttgagttcttccgccgtcaatacggctccggtcgcgtcatcgataaacgcttccagtccggggttgtcctggaacgccgcccgcatgcgagagccggcatctgtcatcttatcggcgaattcccccagcttctcattggcgttttcaagggccttgtcataggcggaaaggtcgcctccggcctctatcctgccgagttcttcaatctgctgctttgcctcttcgatgcccttggcgtcaacggagtacttaagccctacttcgatttctttcttgattgtcctggtgcttgatggtctttaggtgtttcttcttttcccctccccccgtccagttccgggcagggagaggggggcttggttctttcaacggttagagggaagcttcctgtttttcgagtttctggcactcctgtacttgctgaaaaatatggtcaggaatttcccctctggagagggcgagcttgttaaattcgagcctctcttttaacatccggtttttcctcttatgaagcttgtatgctttctttgaaagttgagtcattttctgattatagtaatattgattaatatccgagatgaagccagcgagaacaacaggttgacaaatccccgcctgttctgatgttttcagaatgtcgggcaaaagctgatggatctctttcaacgcaagtgggcattcataccagaactcgcgcatggattcaaggtaacgtacttgaagttccgccaagacggattctgtattctcactatttattttattttctttattatcgggtttgttctcaatcatattattgatattgggttattgtgttatttctgccgccccgaaaggagcaggcaaaatcttgaagggcctccatgcttcccggtagaagtaccaggcccatttttctatcagggctgccgcccgcgcttctgatggctcccacacgataggcaagcggtatcttacctcgaaagttcccaggctccccagaatggccttgctggtcgtcttccttctggacaggtgaaagggcagttcgtcaggatgccccacaatcagcagccgggcaaagtcatatccccggaggcggtggcattcccgctcgaacctgtcacgccccgccgtcaggcttccgatcaggtcaacaatgctcttcctctccaccgtgaaccgggtttcaaatctgtccagggaataatccccgctttgcagcgttccgcgccgggaggagaaatgctgaaaggtgaggggcgtttgctctctgttgtcgatgatgataaggggcgtttccggggtcattgttgtctctctctcgcgcgtgtgtataggtgtgttttttcgcaaaaattgtaaacggcgtagtaacttattgatttatcaatctgaatttgtgtacaaacgtttgtaaaccaatccagaaggattttcattaaatcttaattatcaatacattatttgtgtaacaatttgtaaaccgcaatttgtaaaccttttcccatttgatagtcaatgcgttataaaatccagcggtatttttacgcctctcgccgtggtgtttaccctgctgttcggccggaaaagctgctcttccattcccttcacgttcaggagaacctttttcacgttcaccccctcccattccgaacccttgaatatttcccctatcttccggttcttcctggtggcggcaaggtagacgtatttcttcccgtccgccgcttttcggacgtacaggccgtagcgttcaaggacggtggaatcttccgatacttccgcgctggccgcttccttgatgaactcccggagggtgcggttccccatcatgggcggggaataccccaggagccattccaggcagcgttccccgtcgtcgtccagcacgcgggcgtaatcactcccggaggccatggcggcgcattcctgcatgtcccggggcgtcaggtcttccccgctggtgacaaagtgcgcggcggcgtacacggtggagaacatttccgcgcggcgcccttcttctccctggtcggaaaggtattgcctcagggtttcaatgttgcggcggatggctggcgcatggtgcatgattcgggtcacgtatttgcgccccaagtccccggaccggatgacggcggccagttcatcatgccttcggaaaacgggtgcggcttcggaaggttccttcttttccagttccagttcaaaaatgcgtgattgctcgctggctttttcaatcatggagcgcacggagaacagaaggaaggcgtttctcatgaggtaggtgacgcttttgccgtccgcgcctcccttggtgattccaacatccccgtccgtggcggttctcaatagggcaaggattctgaccatgttggccgtcttggcggggttgtcggagtccgcttcatcaaagatgaccgggcaggaatcgctttcaagcttttgccttaatccggcgtccgtagtttccagccctttgaagtaccgagcaacgcccccaatgagaagttcaatgcttttcctcaaggtggttttgccggttcccgccggggcgttgatccagccatgggcgcggaagtggagatacccggaaagaatggcctgcgtgacgaggcccaggcaaaggaaggcgtcttcctcgcgtttccatgagtgcgcctcgatgaactcggcaacgacttttccttcttcgtccgtcagaatgtcatctgacggggccagaagaggcttgccgggcaggtagaggggctttcccgtccgggcatggtccacgggcaggaaggggagtttctgttcgttttccggggagaatagatagacggcatttcccgcatggtacacggcggccccgtcttcgtcccatacgccgcatttccggatggagtcagggtcaaatttgcggttgctggttgtttcgatgcagtagtcgatggccctgtccatgacctggcggggcgttagcttaccgtccggatcaagcgtcttctgccaccattccacaggggccagaaagcgcatgttcaccggcgtatgttccttggtgttccaatggaagagaatttccgagcggcgcgcgtagtaaacgaattgcgccccctgtgttcccagggccagaaaggggggcttcatggcctcttcccgctctttctgcagggcggcggcttcttcgtccatggagcgcgcgccgggggtcaggggcgtcggggctaagggcgtgttcatccttgtgcgagagtgggcacgttagaagttttcatggaacgcatggatgaaaacaagctttcataaagcgcatgttcaccggcgcatagaagcatgttccgcgcgtctttgtaggggggagtccagtcgcggatgacgcagccggcggcggtcagccgttcccgaagtttggcggcggcctcgcgtcctgccttgtccgggtccagggcaagaatgatgtttttaccggcaagcggggtttcccatccggttttgaagcctgacgccccgggaatggctattacggcgggaatggtggcttccaggcttccgcgcccgtcttcgtaggggcggcccgtgtaggggtcaacgtcctgctggtaggcttcccggaagcattcaagagcctgacctacggctaaacagtcgctttcaccttccgtgacgatgacgaaccgcttgccgtgagtggaatcaagtccccagggggccgctgcgttccctatgggccacaaaaagcgcaatccgcgcgagttgcctttcgtggggttcatggttccacggggtttccattgcccgttttcaagcttcaagcaggggttggcatggtggtccctccggcgcaatttggctccggtgtagcgggtattcccttcttcatcttccgccgtgtacaggtataaaagccggttgtccggcgtcacccccaaaaggccccggcccagttcccgcgccgtatggatcagcatcatcaggggatgaatgcccagttcgcaagccagttctccagcaaggcgttcatctttttgcaacctttcccggcaggcgtcgagttcggcttcatccggtgcggagacgaagcgggagggctccgccggaggggcggcggctatggatagagacgggcgcggcctcacggggcttttgcgaaacggaaggggcgttccgtcatcgttgggcggcctcactcctaaaacgtcacagacgccccgcaggacgccgggaaagtctcttttcgtgtccaagccgttcatgccggcgtgaaggtcgaagatgtcgccgccccggtcacaggaccagcacttgaagcggccatctccctggtattccgtgacgtgcagcttgaaacgcgcatgcgttccaaacgggcacggatagatcatgaggcttccgcgctgctggggctggcccaaggtgcgccggcagtattcattcagggcgtccggggttttcaggtccgcgagttcaaacttcatgttttccctcctttcccttccccgtcataaaggcgtccatgtcctcaacgttgtatctcgcattccccgatttcccgccccgttctggttgtaagatacgaacacaatgcgattctcttgcctcggataaataccgccccatactggatatgctcatatcataccgggcggcaagcgtcttctggctggcccatacggcttctatgcttgtgggggcgtctgtttccctcatgtccgttttcaggcgttcaagaagccattcagaccaagccagagcggcggttacggatatgggcatcattcccattccatccgcttccagcttcttcaacggattttccgagagggcattcattttcgccctcctttcttcaaaaattcttgagaccttttctcaagccacgctgttacgtcgtcaagtttgtaacgcgggtgtgttccttttcctcccagcccgccggaaaaataaacacggggacaaccttccttattaagtcgaactagagaacccttgctaatgttcagggtcttgcgtagttcctcgctggtgatgtatggtgtattcctggagcagtcctcctggttgaattttatattttttcttactgcactctgcttttgagtgctaccgtttttagaaatacatccgtttttcatgaaatgtcaaattattttttagtcttttttgtaatcgcctaaccgtcatccattaaggttccatcatttttttataccttctgttgatactcttgagacagtccttgagcaatcgggaagcaagctcggagggcacgggtgcggcttccggtgtcgtcctgttggttggaatccgttcgatgtccgcaagaaacaacatagggaacaatgaggggtttacttggcaaatcacgcacaagtcatcaggccccggcaattcccgtaagccgtctttcatcagggccgccgcttccttgagtttgcggacggcctcggtgacaagggcggcggcctctttcgcttttttctgcgtttcgctcacagatgaacccatggcggaaatgtggatgtctttttcaaggcattcggctatggccgccatgctcattccctgcttcatccatttttccaaagtgtcctgactggcaaaccccatgcgctgaaaaggccgctgataaggagtttttacttttttgccggagggaaaagtgatcagcttccctttctccgcatatccctgaacggccttgctccattcgccggcgtcaggtgttcccgattccgattttactgtgttcatgtcgaagttcgtttgcgatttgttcgtagtcttccgcctccaattcaacattgaatattgccttatctaccaatatatcaataagttgaggcacgtttacatggcatctttccgccagcctccgcagtttgaaactccgttcatgggaaaggaggagtgaataggtttcccgaatgctctctttccgggtctccgtattgttccccagcgcagcggcatagagccatattttcaaggatggttctttcattggcggtccgcgtgttttttggcatccaggaacaggagaaatttcttcttctccaattcgtctttcatgatgccgataacaatctttttaagatactcttcacaggataaaccgaacttcttcgcctcttccgtgagcgcatgaagaacaggggcgggaagagggatttccatttgatctgcgttcatcgaacaatgccccctttccatttcgtcagggccgcgcgatcttgcacgtcctgattgtccatttctacggcccgccagaacaggcagacggcaagccatgccattccggcaaggatgatgccgcgggccaggctgcacagaaccgcccctgccaagggcagaaccgtatcaaacagcgtttcaagtctcatgccgcttctcctttcccggttggagattccttcaatgacgggcacgcccgcctgttaataatgccgagtatgtaagcatccagcgagaggcccttcttagcggcctcctgtctcaacgcctccatggccccggggtcaagctctaccatgatttgatgttgcttcgtcttcatgacaagacaaatatacaacacacgttgatttattacaagcaacatgtgttgtatgttgtcatatttcttgcaacctaagttgtaagaatgtattaaaaagccatgcagaaaaaagaggtgaaaatatggctcaaagctatagggaagaatcgtgattggttagcagaacaatgcaaaacaggaaaaagaatcgtagattcttggctttctacttcaagagctatcccttcacacgctcaagcaatgatttcgcttctcatggagcagtaccccgccgcgggaaacgcccctgcaacgtatccaagcgcggcagaaaatgcaatcaccctcacagtaaatgatgccacctttgacgcctggaacaaggccgccacggcggaaggcaagcttctccgtcaatggtgcgtggacgtgatcaatgaaagccttgaataaaccggcccccatcccacgcccaaaagaaaacgccccgtaacgtcttgtacgtccggggcgttcctgtgtccagggggggaagcggttattgcttatcggaaaaagaatcaaacttcctggccagggcggaaagcaagttgaccgcacgagaaagcaaggtgatgactttagcacaccagaagcagccaaggcaggaaaaggccccagaaaatagttcaagaacggcaagggacggactgctttgaaaagtaaacaaggccagtactacacccgcaatcagggcaattattccgataccccggaacatatcttcaaccgttatttccgttaaaggcttttgagcaacattgatctcttgggcttcgtcttcagaagaaccccaagcgggatcatataatttttccctgacttcttctatctttttacgactcggaaccgtttctcccttctgcgccaaaaccgttttgaactccacccattcttggcctcctactacacacactaaagtttctggtgttatcattccacaattacattgaactttaactgattccaagtaatacggcccctttgtctttccttccgccgtggcaatgtagtactgttccatgctccctatcattcaagctaggggtgttcgttcaagtccaaaatggaaaaggggtgcaattcatctcccctcccactcctattttgtaaacgagacggctattttgtaaacgaatgtaaacgggtttgtaaaccaactagcattgataaatgaatgtcttataaatacggtttacaagttacaaaaaaatatacctatatatgcgcgcgtagagggaagacatgctttcagaaaacgctcttatctgctccagaagacgttctccgcttcctggatttgctcaagctgttccggagcaagggagattttactttcgagaggcaccccagggacgcccgctacatcctgccgaactcggtcgccgaatttctcgggggcgaagcgggcggccactttcagccgcgtttcaatggcgagcttcttggcggcgacggaggcggatccgcattgcggatcgagggcaagccgggatgcttcatccgccagttcaatacattcttcaatcattattgccgcccctgctacgcgcgcgcatagaaagatgtctctaaactttggatattcatttatccaacgatatatggaggcgcgcgccggcatagccggatcttcacaaatattccgcagtgtttcaccgctggccagacggagacatattttttcagccagggcgggcgagtatagggacggccggcccgtttttttctttcctgtcagcgtattcctctgtttcctgctggataaaatctaaagcggatggcgtaaaaggggaagcttcttctctgaaatgcgcctgatttggtccggcgtgccccgtggctgggcgttccaccatggagacagtacacaaaggcgcggaaaaggaggaagcggcctaaaaacgggctttcattgtcttaaagcgagaggtgtttcattgcttccgctatggctgcggaatcaggacggaaatatacccgttcaatctcttcggaatcgtgtccgacaatgacccggcaaaggtcggaaggaacgccagccaacctcaacgcagtaacggcagttgccctcaagctgtgaaagctcaaatcagcctgtcttcttctgtccccgtgacgaggggcgttattcatgttttcaatgaagccatgttccttcaatagttcatggaactccaaagatagcttgcctgatgtattgtctgcctgtgcatgtttcatagctgccaacgggaaaacataatcactcacccgcccctcataacgacgcttcaaaacgtccttcaaggaagaaatgataggtttattcattcttctctttgttttctccgttgtcatggcaattagccctccctcaagattgatctgttcccatttcaatttggcaatgtctcccaatcgctggccccccgtatagagacacacacgcaccatgtccggccattcacccggtaaaatttctgtcaggcgttttgcctcctccatggtaaaagctcttcgttcatgcttgtccgtcttatccagctttccgggtgttaccctgtgaaagggattgctcccaatcagtttgccgtctatggccctgttaaaggccgcccgtaagcaatcagttagattctttactgttccggaagaaacccgttccagctccttttccatgaaacggcgggcatgttcagacgttaccatgtctaacggcatgttttgtgaatctccaagcaatgcgagaaaccgctttacagctacccgatcattcttcagtgtcccattctggcggctcttcatccattcttccaggtattccttaacaccctgcatgtactgcttgcctcgcaaaagttttcttcccgccctttccccggcaatggctttcaccttctcggcatccacccgttccccgttggcggctttttccagttcttcggctatcaaacgggctttggcttcgttctccctcatcacagccattttgctttttcctggaggaataacggaaggggtaacggctattttcgttgttttccggatctgctttcccgcaacgctgaaaagggcaacccatgaattctttcttttgatcaatccggccatgtctaacagtgttttttaatgatgtacacttggagaagatgaaaacgtacacttgagtgtacacctatttcatgcgtactcatgataactcatgcaagcaagaaatgaaaaaacccttgaagaatcaagggctgtgaacaaatatgaaagtaataaagtggtgggtagagaaggattcgaaccttcgaaagcgaatgctaacagatttacagtctgccccctttgaccgctcgggaatctacccacttgaagtgatgtgcggcgaatgtatagggattccggcgccttagcaagttttttttgtaaaaagtaggtatgcccaaggaccggaaaatcttatgccgcaatcatgcctccgggcggcaaaccgggagacggttcctcaagccgccgccgcgccggatggcgtgcccgggaggcgggaaaaggtccggcagccggaagcgccgttcctacggctctcccacatacaccggcgcgcggctgtccggggaatccgcgtccagctgttccagctggggcaggatgttctccatgctttcccagacggcgggaacaatcttgattccggtcccgaactgggccgcaatcatcagggcgtccgacgggcgggcgtccagctccaccagcttgtccatgacctcgttggcggcctccaccgccacgcgggcgtaaaaaacttcatccttgcggccattgatgagcaccagcctcacccggcactccatggcggataaaaaatgggacagcagggaggacgtgtccggccgcaccgggcgttccccgttcaggctgcgctccagcgccatgccgtccgccagctccatgaagataacgcccgccttgccggtcagcggatcacgcaggcacacccctgccccggcccgggtatagagcagggcgtacggttccagggtgatcagcttttcatccggcatggcgtgcggaaatcaaatgttaaaaaccgggattgatgactcgctccgtataccgggtagcgaccttgacgtatttctccgcccacttgcggttattatccgcggattccgggcccaggtccttcaccaccttggcgggggaccccagcaccagggaattgggcggaatgacggtgcccttagtgatcagcgcgcccgcgcccaccacggatccctggccgatgaccgcgccgtccagaatgatggaccccatgccgatcaggcagttgtcctccaccgtgcaggcgtgcagaatcacgccgtggcccacggtcacgtacttgcctacatggcagccgaagtcgtccgccagatggatgcagctattatcctggatattggagtaatctccaatgacgatcttgttgatgtccgcgcgcagcgtggtgtggtaccagatgctggcgtgctctccaatggtgacatctccgatcaggtcggcgctttccgccacaaaagcggtatccgccactttgggccagaagttcgcgtaaggttctcttgccatataggtcatgtattagttgaagataagacagcattccagcctaaaaacgttcattccacgggtatgccgcagccggaggcggccagggccgcgcgcctggggaaatgatggatggggccgcaggcggcctgccgggctatccctcctcccggatgcccttcttgctgttcttctcccgcttctccgcgtccttgcgcagggaagcggccttcttttcattgccgcccttttcatagtacccggctatcttcctctggatggcaacctccttcttcaccttgaagtagtcgtccgacttggtccggatatagcggttgtaggaggattccgcctccttggcgagctgaagaacggcctccggctcctgggagacatactggtaatactgccccatcagcgcctcgaacacttccgcgcggcgcgcgtaatccttcatggacttgcggtacagggaagccacgccggccttgtccccgttctccatcaggatgtccgcctgccgcttgatggcggcggaagtcaggtcgctgcggccctcgtccgtctccttttccagctttttcaggtcccgggccacattgcgcttgttggtggaggcgtcccgcatggggaaaatgtattcatcctccacgcgggcggccatggccaggtaatccggccgggagcggaacttgcgcttgatcatggtcaccagcgcatcccattcctccagcttcgtgccgctttccggacggctcatcagcgcgatcaggcgttcccagcccagagggcttccgggggtggcctgcgtggcggcttccagcatcacccggacgcaatccggcttctgcatctcttcaaacaggtccgctagggaaaggtaatccagggaggtgtccagccgggagccgttcaccttcttgtccatgccctgtagaagagtggattcatgctttgacttgcggttgtgcggatgggaaaaatgccccgtattgtacccatacccgccataggactgccaggtttcgtccgtcgtcagcagattgatccaggcgtgcgggccgcggttgccgtccccggtgacgtaggcggagggaatgccgttgcacttggcggtattcacggcaaaataggcctggtccatgcagatgccgccttcatccagaatctcctggaaggtgtaattcgtgtaagggtccttgccgagggcggcgcggtccatccggtagcggatcatggaataggcgccgccccagcctttccgggtaaggcgcaccttcttgcgcgcccagtccatctccgacctcggcaggcgcacgtccaccacgaacagcagctcggaagggcttaatttggtaatatccgtaagaagctcgtgggcttcatccatctccacgaagtactcgaacacctgttccagcgtcaggggagtggtggaaatgttggtggaagaagaggcccgcagcctggacggactggaggcgatgcgggggtccagcatggcgcaggccagcgccagggaggaatacttgctccggggcatggcggaggttttcatccagaactccgcccacttccgcaggatgcctccccattcctccctgggagtctgttcccgcgccatcgtgcgcaggaagagccgcagggggtcggaggggtctgaaaaaagccatggatagaaatacctgggggaactctcctggatctgttcctgaatggtttccgcccccaccttgctgatgagctggtacagctcattggcgcgcatgagataggggctttgatcgtacatggacacgtcgaatttgccgaatttgatgaccttaacggcgtcacgttccagattggaccgcaggaaaccggcgtacaagtcatagcggcccgtctccagggccagattgaaggcgtccgtaaacagctttctattggcggcgttattggccttcaggctgaccagcaaaacgggcttcttaaaaatctccagccgcggatcttcctcctggaccacgggctcttccttcagttccgcgggagcaggcttcaccgcttccggttccttcttctgccgttttctggcggcttcctccgcggccaggcgttccgcttccagccgtgctttttccgccgcctccgcacgcgcccgttcctccgcagccttgcgcgccgcctccagctccgcagccttccgtgcgcgcgccgctttcgcttccgcctcccttctggccgccagctctgcggcccccgcctcccgttgaacggaaatgcggtggtaaaccactccgccgccggcaagagccagcaccaggataatggtcatgacaattcccccggaggaggattttttacgcttgggagaaccgggacgcaagggattgacaggattcatgggataaggcttgaacgggttggagcaaattgggcagggaaggaaaaaagatttccatccctgttccgtttgacataaaagcgcaataccctcccaaggtcaacttgaaacaacggtcttttccggagagtccatcttccggaacccgttaagaatcaaaccaagggatttttccttgtgttttcatagccattttataggatgaggttctcacgtgttcccaaaaacatgagaaaaatacaagtatcctgctgattattccatcatctttatccgtctttcgccacctatgaatatttctcatgctctcagcccgcttctggccgtcatttcgggaggcctcctctccggaacggccctcagtgacaacatcgtgctgcctccgccggacaaaaagggcggcaggccgctcatgcaggttctgaatgaacggcattccaccagatccttcgcagacaagcccattccgatggaaatcctgtcttccctgctctgggcggctcaaggcgtcaaccgggacgatcctgattaccgtacggcgccgtcctcccagaattccaacgaaatagaaatctatgccgtcctgccgcagggcgcctatctttacaagccggaaacccaccagttggagcgagtggttcagggcgatatgcgtgccgccacgggaacgcaggaattcgcggctaccgcgccgctgaacctggtctatgtggtggaccagtccaaacagcccggagactttgacgccaaaagaaaactggtcacggcctgcacgggcgtggggttcatcggagaaaacgtctatcttttctgtacttccgcgggcctcggcaccgtcttccgcgccatgattgacgccgactatatccagcggcgcttgaaactccccgtctttaaaaaagtcctgtacgcccagagcgtcggttacccgtccgattcctgaaagaaaccatgaaccggaacgctgtgatactcgccgttctggcggcgcctcttccccttgcctgcgcagaaatcttgatggacccccccgctcccatcaaggtaaaagacgccagaaactgctaccgcctcagcccggagctgtaccgttccggacaacccggcggcgacgggttcaaggccctggaaaagctggggctcaaatccgtcctgaacctgcgggaataccacagcgacgccgatgaggcggaacataccggactgcgcctgtaccgcattaaactggcggcagggaaagtgacccgggaagaactcatggactgcctgctggtcatcagcagagcgcccaagcccgttctggtgcactgctggcacgggtccgaccgcaccggcattgtctgcgccgcctaccgcatcgtcatgcagggctggaagccggaaaaggcgcttgaagagctgatggacgaacgcttcgggcaccaccggtcctactactccaacctcgcggaactggtcagagacacggactggaaggcgttcaaagaggaattccggagaaaaaggcaggctcagggcgtctgacacgcaggctacggctccccccatggcgcgggttcatggaaaaaagctttttccggtgacgcgggcagaaggcccggcggttttaccactggttgtccaggtttttggtatctatctttccaggctccttgttgcgctccttcatgccgcggatgggcttgggctccttctcgtgaaggtccaggacatcaatcacattctccccttttttcaggaagggggccggaacatacagccttaattgaggccccacattccaataccgccccacattcacgccgttcacccacacgtatcccttggcatagcgggacatgtccaggaacgtgtcctgcggctcttcaatgttcacgacggcccggaaatgcgctccttcccgtttccgggaagggccctttcccttgggcgcctggacaatggagtcagccttcaggggaagggccctcaccgtccagttcttcaactcgcgcgttcccagcttcacagggccgtgcagccccttgcggtcgctctccatgctgatgtggaaattgatatgtcccatggcctccaccaggatttccagcgttcccggcttcttgcgctccggcagctccacgctcttctgtcccaggcgtcggtccagcgtgccgaccggctccccgttcaggtacacctgggcatagtcattgacgttggcgaattccagcgtttcagacggtccggccggaacggtggcgctgtaaacggcgatgccctggttctggttccactgttcgaaatagggcggctgcgggaacttggaccggaagggcttgggcaggttctcccaaaggccggcatggaccacgggcgtgaactccggaatctccatggccgggatgtccgcgggaggttccggcacggcggcttccggaggcagtttttccaggatgatttccctcatctgggcgtaatattcattcatccggccctgttcgtccacgggagagccgtaatcgtaactcgtcaggtccggctggtattttcccggccccccgttgttggcgcccgccgtaaacccgaagttggtgccaccgtggaaaacgaacaggctgaaggagcgccccttgtccataaaccagcggacgtggttgacaatgcctggggtgggggcccagttcccctccccccagtgccgcagccagcccggatacgtttccgaggaaaaaacgggaacgcccggattgcacttattagccacctcccagtggccgtcgttcagccccgggtccagtcccacggccacgccgggaagcaccacccctttcaggaaatgttcccccgcgccgtcggacgtgtaaaaggggccgaagcccttcctggtccagaacgctttcagccactccatgtacttgcggtccttcctctggtagctcccgtattcgttctcaagctgggtcatcaggatagggcctccgtttttgaccaaaaacggctccgccacacgggccacggcttccagataccgcgtctgcgccttcatgaatttggcgtcttccgtagtcctcaatttggccttgggatccttcagcagataatggggcaaccctcccaggtcccattccccgcacacatagggaccggggcggaacagaacccacatgccttcctcctggcatatcttgagaaactctcccagatcgcggttgcccgtcttgaagtcaaagctgccgtccggctgttcatggtcgttccagaacacgtaaaacgcaatggtgttcaagcccatggcccgggcagtcctgatgcggtgcctccagtactccctggggatgcgctggggatgcatctccgctccgcgtatctggaacggttttccattcagcatgaactcctggttcccttccccgccgaacttgaacacggcgggggctccaccggaaggagcgggcttctgcacattccggacagccccgggaccggcccatgccaatgctcccactccggcggccatcagggcggcagcccaactgaaaccatattgcttcatcatgctgaactgttaatccatttgaagacggttgccaatcacaattttacccgccgccgccgcacctgtgaggcgtccttcccttcccccggcggactaccggggccggacggcaggaatttctcctgcggcgaggaatattatcacgtcatacgcctccattcctttgcgcgaaagccggagggcgcctgtctaaattcagcgatatgaaaacaattgttcttctgcgccatggagaaagcacgtggaaccgtgaaaacaggttcaccggatggacggatgtggacctgacggaactggggatagaggaagcgaatcatgcgggcgacctgctgaaagacaagggcatggcttttgaccaggcttacacctcctacctcaagcgcgccgtgaagacgcttaactgcgtgctggaccgtctggaccaggactggctgcccgtcgccaaaagctggcggctgaatgaaaagcactacggcatgctccaggggttgaacaaaagtgaaacggcccaaaaatacggagacgagcaggtgctgatctggcggcgcagctatgacgtggcgccccctcccctggcggaggatgatcccgccaaccccaagtgggacccccgctacaagggggtgccggataacgaacttccgcggacggaatccctgaaggaggccattgaccgcatgatgccctactgggagggaaccatcctcccctccctccggacgctggacaatatcctgatcgtggcccacggcaacacgctgcgcggcatgatcaagtacctgaaaaacatccccaacgaccagcttctttccctgaaccttcccaccgccattccctatgtgtttgaatttgacgattccctgaacctggagaaagactactttctgggagatccggaagaaatccgcaaacgcatggaagccgtcgccagccagggaagcgcgaaaaaaaaaccgccgaccgcctaacccccctcccttccacatgaccgaccattcctgccgcattgcgttttttgacgccaagccctacgaccgggactccttcaatccgatcaacgagcgcgaattccattacgacatccgctacttcaaggggcacctcaccccggacagcgtgccgctgacccgcggcacggacgtggcgtgcatcttcgtcaacgacacggcaaaccgggaagtgatccggagcctgaaggaaaacggcgtcaaactgctggccctgcgctgcgccggattcaacaacgtggacctgaaagcggcggaagaagcggacctgcccgtcgtcagggtcccccaatactccccctatgcggtggcggaacacgccgtagccctgatgctctccctgaaccgcaagatacaccgcgcgtactggcgcaccagggacggcaacttttccctgcacgggctgatgggctttgacatgaacgggaaaacggccggcatcatcggaacggggaaaatcgccagaatcctcatccgcatcctcaagggtttcggcatgaacatcctggcctacgatccgtaccccgaccagcgctttgcggaagaagccggcattacgtacaccacgctggacgacctgtacgcccggtccgacatcatttccctgcactgccccctcaccccggaaacggaatacctgattaatgcggactccatcggcaaaatgaaggacggcgtgatgatcatcaacacgggacgcggcaagctgattaatacggaaatgctgattgacggcctgaaatcaaaaaaagtggggtccgccggcctggacgtgtatgaagaggaaggtgaatatttttacgaagacaagtccgaccgaatcattgacgacgacaccctggcgcgcctgctctccttcaacaacgtcatcctgacctcccaccagggctttttcacgaaggaagccctgcacaacattgcggaagtcaccctgcacaacatccgggacttcctggaaggcaagccgctggccaaccgcgtatcgctccagtcacactgaacgcacccggcacctgcttccgtgagaggaatgcgcgcggcctcccatccgtgttttccccgcagggccgccgctccggcatccgtatgccggacggcgcatgaagttcatgcgccagggaatgcgccccggcggagtgagcggaaaagacgccgccgcttttccgcgccagaggacaggcacgtcataggaaacagtttcacccccctctttctccactaccggccgcctgaccgcgcgcatcacattcccttcataatcccagctctccagcgaccactgcacgttgtaaatgggcggagcccggtacacgcattccacggaaagctccggtatccggtacggcgggaagggagccggaaaacaacagccttgaaccaactgggagaacgggttgccgggcatccaggaacaactgcctccccagggtaatggaacagccgttcaactggaaaaacaattcggcggcaatccagtccgttcccgcctttccattcaggcccggccatctgtttgcggccacctccaccacttgcagcaagcacggcacggacggcttttcccgttccgccggcggaaggctctcccatataggccgccacaggcgacaggcgcgttttttcaggcaggattacgggctgttcaaaaggttcctcgtcaaagccgtccaggaccttttcagccttcagcgctcccgtgtccattccggacaggaggaaaatcagcaaataacgtttcatcatcaatcatcagggcagccagggggtattccggccatcgttgattaaatgctcttgacgcatggagaacaagcagcttttcctctttcttccttctcaacatactactggaaatttccggaaaattatccggcccagcgtcaagcttcccagctgtaaaaactcccttgttaagtccctccggaggccggagaatcgccggccctctcgccattccggaaccatatccggagggaaggcacgaaaaatcctgcccacttttttattgacggcaacagcgtcttgaaggacaagatgaaatagattaacatctgtctttcaactccaaccatccatatccaacatgaaactgctcttaatgctgaatgcctccctcctgctctgcgcagccgtccaggccaaattcccggcggacggactgattaaaacggcagcctccggcgccattcaggggaagaccgtcctgatgaaggctgaaaatgcggaactttccaaaagcaagctggcaaaaatacggtccgtcaaattcatcgccggcatggcggaaaaagactccggcgcaagctgggaaatcaacgtcgcccaagacggggaatacatccttgaagcctggtacacgttcccctggacggctaccgcttccgcccgctatgaactgaaatgcggcgacagcgcccccttcctgtggaatgtgcccacttccggcggcggtgaggccgatgggggaatctaccatctgggccgcatgaacctggttaagggaaaacaaacctttacgctcaagaaaaaagggagggacggcatttacatccgctatatccggctcattcccgcctctatcttcccggtagtccagccggcggccagcggcaaaatcacgctctcgcctgaaaactgcctcatcacgcatgccctggcaaaagatgcgggaaaattcaacatcctgtcccacttcagctccgtcagctgggaaatcttcaccaaaaacggaggaacctatacggtaacgacggattatgccattgccgatcccgcctccaccctgttcaagctgggttattccatcaatgacaagctgacggaattcacttttccgggaaccggcggatggtcccggttcgtaaagcactcccccggcgtccttaccctgccgccgggaaaatgcaccctgaccgtcaagggaatcaccagcggcgcggaaacaaagtccattgtacttgcccccgcgccgtaggcgccgggcctcttttcctccggaatccggctctttaaaggaaaaagggagaaggaacagccttcatcatttttctttacgtctcacgccgtctgtggaagataggaaacggcttgcctgtccgccgggcaagccgtctcagtaccagcctgtaccgggactttccctgcggaaaaacccgttccggggttccgcggccgcgcacgtaaaatacgcatcgcccctttttctgtaagcacaatcacttttcgccgtacttataccatgagcactccggcccctctctctccctccgttctggctcccaaaccgcattatgccgccctggacggcctgcgcggcgtagccgccgtcatggtggtcctgttccacatgtttgaaggaagcgccagggacttccaattccacacggaccagatcatcaaccacggctatctgtccgtggacttcttcttcatgctgtccggcttcgtcatcgggtatgcctatgacgaccgctggggaaagatgagcctgtgggatttctgcaagcggcggctggtgcgccttcaacccatggtggtcatggggatgctgctgggtggagccctcttttacttccaggggtctgaaatcttcccgaacatcgcacagacccctgtatggaaaatgctgctggtcatgaccgtggggttcacgctgctgcccgtccccgtttccctggatattcgcggatggacggaaatgcacccgctgaacggtccggcctggtccctcttcttcgaatacatcgccaacatcctttacgccgtgctcatcaggaaattcaccagccggtggctggcggtcctggtcttcctggcggcctgcgccctcatccaccagtgctacacgcagggcaacaacatcggcggctggacgctggacgtggaacagtgccgcgtgggattgacgcggctcatgttccccttcttcggcggcctgctcctgttccgcctgtgcaagcccggccgggtcaggcacggcttctggtggtgcagcctgcttctggtgggagcgctggccatgccgcacgtgggcggggcggaaaacttccgcctgaacggcctgtatgacgccttctgcatcatcgtcatcttccccgcggtggtctttctgggagccagcgacatcccaggcgacatctcctcccgggccagccggttcctgggaaacatctcctaccccctttacatcacccactatcccatcgtttacctgtacctggcctgggtgcacgatgcggaagtgcccttttcccgcgctctccccgtggcggtgggcgtcctgttcatctgcattgccgtggcctacgggtgcctgaagctttatgacgaacctgtgcgcgcatggctttccaaacgcgtgctggcgcggcgcgcaccggaacagcccaggccgtaaaacggagcccagggcataacagcggttccggggcgccaggaaaacaacgggagcgccgggacaaacatctgccttgcccccggcgcggcccagccggatactggcggcggtcttccatggaaaaactgccgacatcctccaaagcgctgcgctacctgccctttcttgtggcatcggcattcttcatgcagatgctggatgccaccatcctgaacacggccatccccaccatcgcccgcagcttcaacagccacccgctgcagcttcactccctggtgacggcctacatgcttaccgtctgcgtcctgataccggcctccggatggatatccgacaagctgggctcgcgccgcacttttctcttcgccatctccgttttctccgcggggtccctgctgtgcgccctctccacctccgtcgccatgatgacggcgtgccgcgtcatccagggaatcgggggggccttcctgatgcccgtagggcgtctggtcgtcctgcgctcctatccgcgctccatgttcgtcaacgttctgaacatcgtgacgattccggcgctgctggggcctctcctggggccggtgctgggcggcatcatcgtccagtacgcctcctggcactggatcttcctgatcaacattccggtgggcatcgcaggcctgtgggccacctggaaactgatgccggaccttaaagcggtccgggaacagaaattcgactgggcgggcttcttcctcttctcctcctccgccgtgctggtcaccatgggcctctccaccgcaggaggcgcagccgacaagacgcgcatggccctgctcctgtcctccggaggcgtgttccagctcctgtactgggtgctggcgttccgttcaaaggcgcccatcttcagcccctccctgttccgcatcaggaacttcgccatcggcatcgccggcaacatcgtctgccgcctggggggaagctgcctgccgtacctgattccgctcttcttccaggtggtgctgggttactccgccctccagtccggcatgtccctgattcccctggcgctgagcaacctgctggcaaaaacggtcgcgccgcgcctgctcggcaaattcggctaccggaacatcatggtcgtcaatacctttaccatcgggacgctgctggccgccttctacttcatcagccccggcacccacgaactcaccctgctgggcatgctcgccctgctgggcgcggccaactccattcaattcacctgcatgaacaccctgacgctgattgacctccccaacgcggacgccagcagcggcaactccctgctctccaccatcatgcagctctccatcgccgtcagcattgccgcggcctccctgctgctggacagcttcggcggccattcagccacctccggaaaggccgtggaagccgccttccacgccaccttcgtcaccatcggcgccattgccgcggccagctccttcatctttgccctggtggataaaaacaagggcatcacccgcagacggaaaaaagcggcctgacgcgcgggaacgcggcccccgcctctgttcaggaacaggaaacgctgtcccccgtttcaagggagcagcactgcgcgaactgggcgcgggactcttccagggtaatcggcttcttgtccgcccccagggccacgtaaaccagctccgcctccgtaatcttggcaatattattgcagagcttcgtcaggcgttccgcgtacacctccacctttacggtgacggaggtgcgccccaccttgataatctccgtataaaaggaaaccacatcgcccaccagcacgggagcttcaaacgtcaggctgctgactgcacgcgtcacgatgtagcggctcaacgcataacgcatggccgtattggctcccgccaggtccacctggctcatcacccagccgccgaacacttccccgctctgattggtgtccgcaggcatcggttccacgcgcagggcgggaatgcgtccctccggaagctgggtatggtggtatgtattttccataaataagaacaattataaattaacgggctcatgctcatctatcccggccctcttgtaaagagcaaaacgcggaaacggaaggcggacagccccggaggattcctccaagaaaggggaatacgttttcgcaggacaataaagtattgacgatagatgtgttatcagtttaaaaggaaccatgcggattcctccttccccgcccattgccctcgtctccctttccctgctggccgtgccggtttccatggctgatacaacagactccggaacctccccttccattcaaaatgagggaaaagaaaaaaaggcgcctcaattcaaactcacgctgagggaatatacccatcccggcggagaagctacctgcgtgttacgggacagttccttcccttatcccaaagattacatgctgcaggattacctggcggccctggagcaattcctggaagaacagcaggccaggggaatgccgctggaaaaaatcacttgcttttccacgccttccctgggacgggcaaaggacgtccaggaaaaattcaagcagctggcgagggaggggaaaagccgtgtctccaaaaaggacggccattacatgagcgtctgcgtgaggctggtacgggaggaaaaactgctcgccccctacagggaaaccttcaagcgcttcggattggaggtggacgacaccctttttggagaatccaaaatggcaagggctcccttggacgtgccgggaagaaaaacccccgtctattattttacgggagggatggtgaacctgaagctggctcccctgaaaccgctggaacaaaaggctccataaaaaataaaaatgcgccgggacaagccgcttttacaccggacggttgaatttgtgcgtcttatcccggccttttttacaatggcccgcaaggacggttgtccattccttatggaccgcgaccatgaacccaaaatgaaaaaagtggacggggaggaacatcccgcttccgacttcgcctatgttcccgacccggaaaagccctccacctggaaactgccgattttcaacatgcatcatgtagggggcgccctggccgccatgaccagtgactaccgcggcaatcccgtggaaatcccggaaggagaccgccacgccgtcatgaaaaaaatcctggcccggaaagcggagctggaacaggaaaaaagctgactccggcttcttgcattccttttttcttgcgcctggaaacaagccgggaaagatggctttctcccccggctcccttgattctttgccatccggcagggtaaaacctgccggactttttttgttccgccgcctgctgcgcgccgcgggaagctccgcaattgtcccccccacttataaaagaggcagaccttcacctcttttctcccctttatccatgtaatggcatggccttccaccgccgcctgtgatagaatccctccaccccttattccgggaaaacgggaacggcgcggcgttcagccgccttttcccggacaacggctgccgaatttcccgcaaaggcggaatacccggaacgccattccttcctctttaaacgccatgaccggagaaaaagtgaaaaaatgcctttggctcttctggatcaacctctttatcggggcattcacgttcgggggcggctacattgtcgtgccgatgatcaataaatactttgtctggaaaaaacggctgttttccaaagaggagcttctctccatggccgccatcgcgcaatccacgcccggagccattgccgtcaacctctccgcgctggcggggcaccgcaccgcaggcatggccggagtcatttgcagctgcctgggcgccatcatcccgccgctggtcattctttccatcatcaccgtctggtatgacgccttcagttccaatcccgccgtggaagcggtcctccggggaatgcaggcaggcgtggcggccctcattgtggacatagtcgtggacatgtggcagatgatcctgcgcagaaaatccgccctgctgaacgcgctggttccgggcgcgttcctcgccagcttcgcctttcacgccaacatcgccgccattctggccgtgtgctgcctcctgagcctgtggcacgtccggaaaacgctgggaaggagggccggatgactcaggcattatggcagcttttcagcgtctttctccagatcggagcgttcagcatcggaggcggctacgccgtcatcccgatgatccgggaccaggtggtcattcaccagggctggattacccagaaggtttttaccgatatcatcacgatttcccagatgacgccaggccctctggccatcaacacctctaccttcgtcgggctgcaaatcgccggcattcccggcgccgtggcggccaccctgggctgcatcattcccggcgtggcggcggcgctgctgctgcaccttttcttccaaaggcataaaaaatccgcttatgtttccggggtgctggaagggctgaaagcggcttccgtgggcctgatcatgtccgcgggcggcaccatcctgctgctgaccttctgcggcacctttgactggcacgccatcgcggaagtggacttcccgagcattctcctgttcggcgcggccctgttcgtcctgcggaaatggaaaatgaaccccatcctgctgatgaccctgacgggagtggccggatacttcatttacggactgtcctgaaatccggcgcggacgcgctgaaaaacggaggaaggttcccgccctccctcggcgcaaataggatgaaaggatcaaatcatttgatcatcaagcgggttaatcagcacaatatagcggcttttcccgaaaacggattggagaaattcaacaggattcaaggaagaccagtgaatgaacggctctatcaggatcaatggaaataacattcagaataatcctatataagtgaatatcaatgacatgctgaaataaaagcatgtcttcccttgaacaggccatccaaatcccggtcatcacggataggaaatgcggaacaccggagaaagggacgcagccagctatcttacgcatggcgggcggcgccttccttctcccggcagtttcacgccaaaacatgactgatgaaaaaatgagtactaaagacattcacgaaatgcaggacccgcgcgacgaattccgccaggaagggtatgaaaaacagcagcagaaagctcccgggctccagtccgaaatggaacccgtgccggacgccggagaacaaagctatcatggctgcggcaagctccgtggacggaaggccctggtcacggggggagattcaggcataggccgtgcggccgccattgcgtatgcacgcgaaggagccgacgtagccctgaactaccttcccgaagaacagagcgatgccgaggaagtggcggagctcatcaggaaggaagggcggaacgccgttctgctgccgggcgacctcagcgatgaagccttctgtcaaaaactcgtcagggacgctctggaaaaacttggcggcctggacattctggccctggtggccggcaagcaggtagcggtggaggacattcaggacattaccacggagcaattgactaagacatttgaagtgaatgttttctccctgttctggattgccaaggaagcccttccgcacctcaagccgggagcgagcatcatcacgtgttcttccatccaggcctaccagcccggcaagaacctggtggactatgcctccacgaaagcggccatcatcgccttcagccgcgccctggccaagcaggtagcctccaagggcatccgggtgaacgtggtagctcccggccccatctggacggctctgcaagtgaccggaggccagttgcagaaggacctgccggaattcgggcagaaaacgcccctcaagcgggccggacagcccgtggagctctccggcctgtacgtcttcctcgcctcccaggaatccagcttcatcactgcggaagtcttcggcgtcaccggcggcatgcatctggcctgatacggaaatccgcggcccgggaaaaggcttcatgctgcctgcccggcaaacccggaaccatggcccgttccctttccggactcccggaaagggaaacttttgccgccttcatccctccgcggaagcatgaactccattcatccgtcaggcaaaccccagcaggcgcgccgttcccgccaccagaaggcacatcacgacgccgcaggccgtcggaatggcgaaggcaagaacagcccacttccatttgcccgtctccttgcggacggtgagaagagccgttgaacacggccagtgcatcagggaaaacagcatggtgcacaacgccgtcacccaggtccaaccgttattggtcaggagggacttcagctcgttcatatcgtccatgtccatcatgttgtcggaagccaggtaacccatgatgatgagggggaaaacgatttcattggccggaatgccgaggatgaacgccatcaggatcacgccgtccagacccatcagccgcccggcggggtccagccactgcgtgccgtggacaagcaggctggagtctccaacgcggatattcgccatcagccagatgacgattcccgccggagccgccaccattaccgcgcgccacaggaccgccagggttctgtccagaaaggagcggacgatcacgcggccgatctggggcttgcggtaggggggcagttccagggtaaaggaagacggagttcccttgagaatcgtatgggacaggagggccgttatcgcaaacgtcattcccacgcccaacccgatcagcagcaccaggcccgccacggaagccagcggctgcaacccggacgccaccgtccccgcaaaaaacatggtcatgagggcaatcagcgtcgggaacctgccgttgcaggggacgaaattattcgtcaaaatggctacgagccgttcccggggggaatcgataatccggcatccggtgatgcccgcggcattgcagccgaaccccatgcacatggtcagcgcctgcttgccgcagccgcagcacttctggaacaccttgtccatgttgaacgccacgcggggcagataaccggaatcctccagcagcgtgaagagggggaaaaagatggccatgggcggcagcatgacggacacgacccacgccaccacgcggtaaacgcccagcaccagcacgccgtgcagccattccggagcatgcgccaggcggaacaggtccgtcagcgcctcctggccttttccaagcaggtcggccagccattgggaaggataattcgcccccacgatggtgatccagaaaatcagcaccatcagggcgaacatcaggggataagccgtccaccgccccatcagcaccttgtcgatgcgcctgtcgcgccccagcccccctccgtccggcaaagcgaccactcccctgcacaggcgttccgcctgttccacgaataccgccgccacgcggtcgccaaaagaactgcctgaagaaccggcctccgcggcggcggcctcacggagaatctcctgcacctccttctcctctctcaaaccggttcccgcgtactgctccagaagccgcaacgttccctcgtccccttccagcagcttgacggctgcccagcggggcgacaaaccgcgccacggaagacgcccggccaacatttccaaacgcgccagccacggttccacgtgctccccatagggcagccggagggggggccgcctctctccggaccacgccatccgctgcaccgtatcagccagaacgtccaggccttcacctttcgccgccgatgccggaaccacgggaactcccaggcgtttttccaaaagcgggcagtcgatgcggatgcccttccgccgggcctcatccattaaattgacgcagaccactacatttcccgtcgtttccatcacctggagggccaggttcaaatcccgttccagattggtggcggaacagacgacaatgacggcatccgcgtcaccgaaacaaatgaaatcccgtgccgcctcttcatccgaagaacaggccagcagggaatacgtgcccggcgtatccaccaaaaggtactcccggggaccgcgccccacaatgccttccgcgcggacgaccgtcttgccgggccagttcccggtatgctgcctcagccccgtcagcgcattgaacaccgtgctctttcccacgttgggagcgcccgccagggccacgatgggcatgcgttcttccgccgcgccggaagatccgcccttctccgttccgctgtccagcctcacccgttctccttccatggctgatttcacgcggacttaacggtaatcatttccagatcggaagacctgaacgccatgaccgttccgcgcacaagaaaagcgacggggtctccgaacggcccccgttccaggcattccacccgggtgccgggaatcatgcctatatccatcaaccgccgtctcaaacggccttccatcccgagagactcaatcctggcggtctccccttcaggcaactggttcaatgtcattgttagttttctcctttccattaattgttcatgcagaaacttccacgaggatggcgtcagcggcggcggcaggcaattccagccgctgtccttcttccgccttcaccagaaacgctccgctgtgcgcttccgcctccatcagggctaccgtttcatgaagatgaatgcccagggaggtgagaagctccagcagctctttcgattcgggaacgcgcctgattacggccggaatccctgccgggatgtcggacaggcgggaaagcggcccttccggcagcggcccgtcctccctccccggaatcctccttccgtgggggcacatctccggataaccgagaaaacggtccagtttttccatcaagcggggggaagccgcatgttccagcttctccgcctcttcatgaacgtccccccacgaatacccgagatgttccaccaggaaaacctcccacagccggtgaatgcgcaccagctgcatggcggcttcctctcccttccgcgtcaggcggatggagcgtctttccatgctctccaccaggccttccttctccatcttccggataatctcgctgacggaagcggcagaaacgcccagataatcagcaatatgcctgttgccgaccctctccctgctccgctggagctcggcgatcgctttcaaataatcttcacggctgctggtcatggctctgatgatctccttcgttataaggtatacctaacaaaatgatatttcgctcaaacaaaaaagcctctcccgtgtcagcagagccatttttttccattacgcaaacggcagggaacggctttgaaaaggaattaggcgcattccttcatttcccggttgtccccgcagaaagttcctgcttgaataaggcatgtccttcggcggcactgctctgtcttttcttcttttaacggccctgctccttcccacggcgcatggcggcccgctggatgctcccgtcatcacccttggagagaaaaaaagcctgttcggagaaaaggcgcaggctaatgaatacgtcagctatgccctctactactggcctgaccccgccaatccggaaggcccctacaagcccattgacggcaaaaagaaccaacggctccgcagcatggacgacagcggcaagatggccgcttttatcggtacggtttgcagcctgggacgccagtacgaactcaacagggacccgcgagccgcttctcgtgccggggaatggctgagagcctggttcattgctccggcaacccgcatgcagccccacctgaaatacgcccagatccgccccggacaccggacggaaggcgacggaggcggcatcatagacctttaccgcatgcccgattttctggatgccctggcggcgttgaaacgctccggggccttgacaaaagaggaatggaagcgggtggacgcgtggctgaaccagtactacgcatggctggccaccagcaggcagggcaggcatgcgcatacgcgcagcaacaaccattacctgttctatgtggcgcaatgcgcccatctggctcactttctgggccgcgacaacgaagcgcgccaatggctggcggaagccttcgccaacatggaccgccacattgcccccgacggttcccagccggaagaactcaagcgggcggaaccatggcaatacagtgtttacacccttcaggcctggggctacctcgtgcaaattgcggaacgcatgggagataaaaactaccgttaccggaaaacggccgccggggcttccatccagaaagctgcggactatctcctgccgttccgtacccatccggaagcgtggccctggaaaggctccagggcaggaaccccgcttcccgccatctttgaaccgtcccggccggataaggaaaaacaggaccgcccttgaacaacggcagctattaaaattgcctttgattcattggaaaaccccttgttcggcagcatcacggcacccggaaagagacgttttcccgggaaacctgttcagtaaggaacattccggcggcatcttcccttctcttcgcggctttccattcccacggcgggatgggattcggctccgcccaaaggccttttttggacttcctggcctccgcttcaagggaagcgagtttccggctggcggaaaattttttatagatccacgcccatccatccttcaccaactcctcattgacgaacacctttccataccagacttcccccaaaatacggccgtacctgtcatgctggctgtacttgactgtaaccgtctctccccaaatcagcttttccagatactccttggctccttcatacccgttttgccccctttccggcgtatcaattccttcaagccgtatccggtaggtccgcttctgttcgggcgttttttccaggagagtaatggtatcgccgtcaatcacgttaatcacaactcccctgatactttcaccaaaagccatgcaagagctcatcaggaaaaccagtagccatctcataaaaaaatgatataattcaaaaaattgcaacaagcaatcattctttggagaaagtctttcccgcaccggccggtcggccgcaaatgaaaacaaacatccatggcagcaccgttggaacatgaggttccagaacgttcattgcgcttcccggcacaccacaccgcaatccctgaacctattccgaacctggccggagcattgataggccagactgcatcactgctccgcgcggaaaagcctgcattccgctgccggcttaaggataacaggaagtttcatgcagttacccatgaaaccgcttgcgaaaaccgcgcgtccagcatggaaccggatgcccagcggcattcagcaggatgaaacacggaaccctgttcacttcttcaattcctcggcaattctgccgaggttcttttccgttgccttcctcaacttttcctgctgtttccagttccaggctgttctttcggatactccggcctgttccgccagccagcgcacggcgccgctcgtgtcacagcccgttttcttctggatgacttccagcagttgagtgacatatttgttcatggtttcccgggttgacgttatttcgattcccacgcccggctgaattcgccgtcccggaacagggccgcaatgccgctgagctgcttgaggcgcaacaattcctccgcatccatgccgaggtttttgagtatccacgcatccgacatgcccgcttccgtcagttcctggataatgctggtcatcagtccgatattgtgagacccgcgggcacggttgtgcctgatggtggaggccatgcggtttccaagaggcttgtcgataacggccaccggcatcatgccatcctcccgttcgtagatgtcgcggtaagttttcatgatctggcagcggtggaagccgtcaacgatttcataggtgccgtcctccagttgatagcagacaatcggcatcgtgtagccgtcctccttgatgctctggtagagcagcttcatttcaggcggcgccacactgttcgggttataggcattggagcggatttggtccagcggaacacgccggatttgataaacgggggattgatagggggggttcatgaaatgttgcggtatttgttgacggcggcacggcgccgggcaatcgctcccttggttggactgaatccggcatatctgcagaaatagtcatttttcatgatgcagatgcacatgcgcttgtaagagggcacctgccggaaattgctgacgggcatgtcgtcgggataacccatgaattgaacgatatcgcgtccatcgtagcgacccgattttcccgtcacggcagccagcgggtaggccgccagcacttcatcggcggttccgggatcgacggttcccccctgcatccagtaccttttggatttttccaggatgttgttgtagtgggccgccgtcctcgcatccatcgtggaaagcaggaattcataatacgatttccaggtatggccgggcggcagcttgatggttttccagcccatggccgtcgtgcctccgtacaggcccgtaaaattgacgccgttgacccggccgatcatgcgcgcccagttggagggatcgatcactttgtagagcttcaggctttcctgggcacagtcgttgaacgggcttgccacccgcatctgcccggcagtaaggcccgcctggtacaagaggtcatagagacggttgtagtcaaaaccaaagcgggcggtggccgtccaaatatcgctgacgcgccagtcatagagagggtaaacgttggccgtcacggcactggtctgcgtaatccacttcctgccctcgtaggatctcctttttttgccgcgtgccacggccgcgtacctgttgaggctttcatccgcccgcagccccaccatgacagcggtggtgccgcgctttttggcaaaatggcgcgagagcttgtcctggaattcgtagtccaccatgccgtgccggaacggaacgtccagattcccttcgtgaaccacatagggattttccggcatggcccgcacccacagtttttttttggcggcgtcccacggcgtccagtaaggttcccccagggcgcatgccgactgggccttaatcggcacgcagtaccacattttacggatgcccgggaactgttccaggaacgtccgggtcacatactcggtcgtcatctggtactgggcctcataatcaaggtggtacatggtcagcttgtccagcagaccgtgttcgtcggcgtaattgtagcacagattgagcaggacgccgctgtccttgccgcccgagaaggccaccagaacattgtcaaactcctggaagcaataggctatgcgctccagggccgcttcatagacgtttttgtccaggtaggttttcacaattcttccagagcctttcttccgtcacccatcgtcaattccctgccgggcggaaatacgccggcacggatactattgacggaggccatgtatttttcctgaagttcttttagtggcttgcagtcgatagggatatcccatgcttttccaaacagggctgcaacgcctttatgcccgcataagtaaataacatcatgtttttccatgttttaaaatacgcagtaggtgattgttcgctgttttcctgcaacaacgccaacctactcaattattatagcaggtcaatgcttttactgcaattatttcagtaattttatttcaattcgccttcttctcaaaatacctatgctttttagcgagtaacgccattcccgacgttccgcgcccatgacggcatggccgccttctcttttccggagcgtccgcatcattttcagcatcaatgttccgctatgggaatcacggccctgagcctggggatgcaggagcaattacatccttgggcgtcacgttgaatggacaaattctgcgatgacggcgttatgcccggtctctcgtcacgaacgtttttcccaagcgccatcctgcgtccgcatttttcagattggcgaggcagcctgctgttccctattgaaggaaagatatctggcctttctttttcaaaagccaggaagcctggcggaatacggctctgccagtcacgctttgagcaagttgccaggttcgccttcagcgtttcatgatgccctccggcacaccaatttcatgccaagacggaatcaaaatcatgcttcactatgattcacggccgatttcgcatgaattccgcctttttcaccctgaaccgggcaaaaaacaaccctcacaagcagttgcacttgtgagggttagaaaattaatggctcccccggttgggctcgaaccaacgacctagtgattaacagagaactaataaatcaacacaatacacttattattataatattatatttttatcattacgccaatattacgccacagagaagtttaaacgtgaagatttacagccgtttgttatcgtttctcatattgggcttgcgaaaatacgtcaaccggaaggaggggctatgattgaaactgcgtaccgctttcatcaggcctggagaagttcaggatgcttgctgacaagctccagaaggcgggcggaggaaccgctggggcgccgctgaccgctttcccacttgatcagcgtcgaaagactcacgcccagcagccgggcaaaatccttttgagtgacgccccgggattggcgaagctgggcaatcgcgttttcattggcccatgcacgggacttgccgggaacgatgaccgctgcccggggttcaggcaggggcgttccgtccgtcaggcagtcttcaacgtacaattccgcgcattcatccagattccgcgctacttcctccacggtgcttccatgggtgcaatctccatccagttcaggcagagagccgacaaagcattcatcctcgtcactccacctgataagccttgcgtaaggacgggcaagccgttttatttcttctttctggttcatggctcttctgttcggttttctgacttcgtcttcttacgcgaacaatttttatcttctatggcgagtctggatgattgttctattcgtttttcttccgatttaacccgcctttccaattttttgatatcctcagcaggggggagtttttctggatggataccacgccctaccaacatctcacgaactcccttgttgttttgtacatgttcacgcgtgatattgtgttctcccataaggtcatttgcttctacattgtagttagtcatttcagtagctaaattctttgcagcaatagtgacggaaggaagaaaatctgccaaaggacggttgggaggaacggctagcaggctcttcatatgacttgttgcttttcccccaaataaagcttggtctcctttggctctgattcgtccaaagccagcatcatctacccctcgttcataaatattttgggatagacgtttttcggattccttgagcttttcccttgcctcaagacgcgtcagtaggttcatacggtcttgaatcaattcctgccgccttgtttgaaccgcaaaatagcactgcgcaaaagctatttcctttttggacggatcgccgttttgtgcaatgaggtagcaggcataacgggtgagtttatagtctgacacttcccgttgtgcaccctttcccacgactatcattttgttgactccaacaaaatgatcggagcattgaaagccagacgctttgcatgattgcttcgctctatcaatcgcagtttcaaaattgcgccattctttgtatcccaaatagggttgtagatcgcgggcataccaaaattccactgacgtttccacatccgtgtaaacaatggaatcaaaatggctttgcaagatagttatttgatcgtcgttattcattgttttatctttttatggttttcaatatggtaatctcgctctatgcaacggtgacatcatctaccgtgagaaaaataacactgtctgtcattttctgaccagtatgcgcagaatcaagtagctatttcagaaggaagagtacatgaaaaaaactgccgcgtccattttggacttgcaggaaaaatccaaccgggaatgatggggagtatggaacagtattacattacaacggaagacggaaagacggaaggtccatatctctttgaatcactggaaaccttttacaaacacggcaagataaccaaagacactcttgtttgcattgctggcggtcaagagtgggtgcagatcgaaacagtcttaaaacaggaagcggaaaaagctcataaggaatctaaaaaaatgtctttggaaagattgatgaatgagtatgaccctattcccaaaaaacaatctgctgaaaggatacaggaagaccacgaatcattggcaataaatattgaaggattgctctgcatcgtcggcgtcatagctctgattactggggttttggtgttcctgttttatgcccaaaaacaacctggaattgggctcatttacctgcttaccggagctttctcctgtcttgggtgtttctggtgcgccaaagttatcaaattgctctctcgtgtcgttgacttgctttccgtaatagccaagaggatatgtaacgttgggggcgaggattgaaaaatgcgcccctggggtcaggggcgtgggtgccagggtgttgttcattatcttctgcggtaaggaagattcacaacaccccctgggcgtttctgcctctctgttttgttagcccattctcccaatgctctgatttgcacattgaaatctctaagcccttggtttaattcctcttttaagccattgaaggcatgttttgtcgtaaccccgaattcttcaagtttggccctgaagagtttacccaattcccgcatttcattttcatcaatgaatccatcagccgcggcggcttcaatgtttttacgtatggcgtcaagggccttgttggctagggctgactggtggggggtagagcttttgcccgtcttcatgatcatgccctgtacaagggttttgatagccttgtcggcttcccgcttctgctcctgttgaagcttcttcagttcacgttcacgttctttctcaagcttcttctgctctttctcggcttccttcttttcccgtttgtcctcctttttattgaacaaactgacattcccggcattgatacgctcctgcgttctcaatccccgttcctggtcaacaatactgttcacgtaatttgccatgatgtccccaatcctcccggcttcttctctggcggcggcaaggttgtccgcaagctcttttgctttggtgttttggtcttccagggctttctggtattccccggctcggctgttcacacctgttccctgctggtaggagggttcaaaattcacatcggattggcggaacaattctcggagttcatctattctgacagtggcggcgttgccttcactttgggcgacgtcacgagcagacaaaagacgttgttttctttgtcttgcctcctcaagctctgttcgttcgaatgatcctctagtcagttgccctgatcttttgtacataccgagggtttcttcgagttgctttatttgttcttctgttttttgcaactctctattactcgcatcaattcgttcctgggctttttgctgttgattgaacagaccacggacttcttgaagggaaggcatctgaccttgaatgaacttcatatcaaaatccttatcttgcaaactatcacggttttgaacggcatcgtccaactgccttccgtggtccatgaattccctttgagatacttccaattccaaacggcgtatcttgtcgtcaagattctggttgatcatcatcatgccgtagtcccgctgacgcttggtgattttgccgtcctcaaagtcattgtccaacttcacgcgggcaagctcggcgtcctgcgtgtcaatgcccttctgacgggcggcttcttccctccgtagctggatttgccgttcaatctcctgcgtttgcaagcggtagtgcgtcgtaatgcccttcacaaagtcttcaaaccctttgtttatggcattcgtgcggtcattccggttgtcatccatcatcagggaatagctctttttgacggcttcggcggtgtccgcagctatttttttcatcctttcagctttcttttccgcttcctggaccagctcatcgcttttgaccttgaaatggtcaatcagggcactaatgccagcggtaagcccctggatcagcagcatggcccagcccagcggccccatggccgtcttgatggtggtgccgaatagatgaatgaacggaatggctccccgcagggaactggacatgccgaggattcgcgttgccgcaatggtgatttgccccgccatccccttgacctgtcccgtggtaagctctccggcatcccctgccgtcttgatgcgccttcccaagtcctggatgttcttcagggcgtccgcctgggctacgttgtcccccgccttccgggcctcttccagcttggcaatgtaggcttcaagttcggcctgcaattcctcataggtggcagaggcgcggcggttcccggcttccagacgttccaccgtggatgcggcggctttctgcttccgggcttccgcatcttccgccttgtccgctgccttgtcggcggcgtccatttccttgttgtaatcatcgatgatcttttgcaggttttcgtcaaggccatccccccacttcgccccaaggtccaggttggaagccctgtcgttaaggacttcaaagacgtcatccacctgttccagcttcttcctgaattcttcggaggtcagaacaccattggttacttcgtcgataaagccggtcagtccggggttgtcgtcaaaggcggctttcatccgggaaccggcagcggtcagggcgtcggcgtattcgtcaagtttgctcctggcgttttccaaagctctttcctgttccggccctatgccctcattcatggcggcgccggtttcttcggcagccgttttggcattgttcagggcatcggttacttggttgatggcgtccgcgccttcgccggctccctgggccgcctcccgggtcttgttgatggcctccgcggtctggtcggctccggaggtgtcggcggtcgtcctgatgttgatgtttatttctttgtttgacatatcgtttatttattggttgttgagattcaagcgggcgtcgcaaagggcgtgcatgacctcccagcgggaggattggggaatgtggggaggccgggggttgccgacgctgaccacgtcataggagcgggcgtagtcctccgggtccgttgtgacgctgtcccagttccaccaggaccagcgcccggcccggttgctgggcgtccacggactcaccagccggacgcggtcatctccgcacaggtcaaagacgatccgggcaatcgtcaaatcctccggggccagcggtagcaagtcacgttcctgcaggactgcgtccgccagtctggccgcccgtccgctcatggcgtaggcaagcccgtgggcctcccggacaccgtagccgcacgaataccagtccagcgcagcgccgggcatgctttcaatccagcctcccgacagaagtgccgtatccgagtcaatcttgacgacgatgtcatcatccgcggcgcccccggccagcgtggaaataatcccccggacgcattccgggccgcgcaggttgccgttgcgggggaagctgctctgacggtaccgcgccccgtaagccaggaaggcccgcctgacgttttccggcaccggggcggcgctgtcatccactaccgtgaccaacgccgcgggaagggccgttctggcgcaccggacgcaggcaatggcctcgttcgcatctccggcatacgtaaaaatataaatcctgatcatgactttccggaggggccgaaggttcccgggtgtatctgcaagtagaccgtcccagcctgatgctgcaccaccttgttgccgtcgatggtggcaaggtggaaataataatcgtaaggggtttcccgtttctctgtggcgagcgtgacagggtcggaaacgccccccacggcggacaggtaggagcccatgtatttggcgtctttatccaactgcaccttcagccagacttccccggaggtggtggggcttttcacccagcccccggagccggcgccctccggcagcatgcccccgatgtagttgccggcatacatggccttcccctggcggatgtaggcttcatccacccttccggcgtcgttgtaggcaagccggcactggaagccgacttcaacggcgcttgtccccatggccggggactcctgggcttgtccgatcttaacggacggccccacgctggggagctccggctttttgtcgtccatgtccgggctggggatggtcccgccgcccggtcccacgccgcccgcggaaccgtcgccggaagacgtggaggcggacgcctgggaggtgttgcggagggcatcggcgagctgcttgcttttgtcaatggagtcctgaagggaaagctgttccgcggcccccaccgtcacgtcagacgctcccgtcttgaggtcgagggtaatctcctggatgacggaacgcatggtttcccactcgcgcagccctcccgtgatggagaggcgccccccgcagacctggtcaaagtcgtcgtgcacagtcgcggagccgtcatagggcatgatgcgggtagccttgtaaatgctctccgtaaatttgacgtacagggctgcggaattgtagtccccgtcgtctcccgggttgccggggtcaaccggaccgtccccgttatccaggtattccaccgttcccttgtcgtccatcaggtaccgggcatgggcgacgttggtcgtcgtcacctcaaacgggatcagccctatccagcgttcaccgccatccgtacgcccggcaaattcgggaaaatactgcttggccgtggcgggcggatccgtggcgcgcagccggacgtcaaccttgaccttgccccacttgatttttgagctcttgccgttgatttggccgcctataagttcatgggaaatggcgttgcggtcatagccccggtgctctgcgtccgcgggcgtgataggtaccactgtcgggaggttggcaacttccaggttggcgcagtccgccagggccggcacccaccgcttgacgcgggccagccattgagcttttgccgcggggaatttgtcacccctgacggtcatccggggggcgtcatagcccagcgtcccagtttccacgggctcatgctggccggaggcgtccgacacattgagcccgccaggtacgtccacctccgcagtgaccacataaggctgggacagggacgcccccggagggtagacggccacggctcgctgtacattggtgccaatggaggcgttgcaggtcagccctacggcagggggcaccaggtcgggccgcgccttgagggaaagggtactcacgtccacggcggacaggtcaagcaccacgtccggcaggttggcatgatcggcaatgaccagcgtgacagcgtcgccagccccatactcaaaccatgcggccatgttggggcgccatttttgaatttgaatcaggagggaagcgtaagtctcggaagagtaggcaaagggtatcagttcggcgtcctcgtcaatccgaaggtcatacctgatgggaaccagggccgttttgatggcgtggtccaggatgccggacagggcttccttgattttgtccgtgtattcatcccactccaccttgatgacaaacggacgcaggccccggcagtaggaaatgaaataccatgtccgcaaccccgtcacggccatagagccgtgaacttgctgccggtagtcatctggcagcacgccgttgagcaggtaaagagcatgtgtcttggagagggggcacttgatttccagtccggcaatgtaatcgccagacgcatcaacaatgagtccgtcagggctgcacccaaccgggccgtctttgcaaaggacaaaccccacttccttgacggtcagtccggttatttttctgaattcgtccctggcttccggttccagttcttccccccgatccgtgtggcggtttccttcccattggatttcatcgggacgtaggaaagagcagcacaattcaataataagggcgccccacgggcctctttccttgttgtttttgggctggggtttgcgtcccgtaggggtaagcagcctgtcaaaattgctggccgtcaggcgtccggagcgcaacttgaaccacgcttccgaacgctggggcacgttctcgtaaacggtacaattcggagataggctcatgtcaataatcctccctgctgatggttacgggttctttcggcgcgggcatcttcagtccgggaataaggtcattctgtccttccggctccggttccggcagggcctcccggggttcttcacggaattcttcaggggacggagcgttgttccacggggtttccccttcggcgggcccatcggttttttccggggttacattccgcatttcgctttcaaattcctgttcgtctgagacgctcatggcttgctggatatacaagggcaaatcccattgcttggaggcgcgcttgatcactgttttcaagcccatttgttcaaaatcggttttccagggtcctacgatttcccccttcttgttacgggagttggagcgggccatgatatcattgacggctttcagactcatccgctccccgtgcaagtagctatccttgtctgtccagatacagtaaaaacccctgatgggtttcttgtcgtcatcccatccgggggtgtgacccatgacaaatttcccgtcctcaatattccagtaaaacggctctccctcacgtgcaatgccaatgttgaggttggtgacgccattggagcgggccatacgcatcaggccgcgggcggagggcaccggcacgcaggttagcacgggctttccggttgctttgtctttagcccaaaatggaacaagatagccgtggatgccgtcaggctcacaccgcatcatcagcaggtttttcagggatgcgatcagcgtcaccggggcgcattgttgaaggaggggggtcttctggcagcagtgccagaagatactgatacagcgttccggcgtcatcatgccctctacaagctgggcaatgtgtctcttcatgtccttcgacatcacaatttcatagagtgtctttttcggaactggcgcctggggcaaatctagtttatctgtaggtgcgttactcataatctttgcatggttctgtgtaacaaggccggggatcagttggcgctgaccccggccaactgctatttaagcattcagggattcgcggtgcttgcggttcagttcgtcgcaaagctcctgagctttctctagggcctcttccttgttgtagggagatgtgagacaagcgtctgaattccaccatattgtgtgcatatagtagtcacctctcgtgacccggaaactacaagtcatctctttgacctcataaggctgttctgcctcaatttcttcaatgggcttgacaagctcaatgcaggcagctgaaaggtaattgtttcggtttagtaaaacgccatcagggaggctaacatcccctcccgcaatctcgtctccacaaagggccacttggcctccaattgcgttatttgcggacaactcccgattacctccacttccgaaaagcctcccgtgaaatccggtgattcgtaccaaatcccccttgcggtatttccgcgccgggtcgtatttcgcctgggcggcctcaagaacagaaggttcaaaaaagccatcttccgttttgccgtcatcacggcggatagtgattttgatagggttaaaatccattccgtcatcttcactgatcgttccccggatgatgacttctgttccgggcttgcattcgtttctttgcatggtgttttttctggtttgttgttatttaggttaggttagttggaaatggtacttgaggggttcctcttccgttttgcgggag
